United States Patent Application Publication US 2026/0097123 A1 - sequence listing, part 2

SEQ ID NO: 30111 - RNA, 21 nt, synthetic construct
  source 1..21: mol_type = other RNA
tcaggtctgccggaagctcct

SEQ ID NO: 30112 - RNA, 21 nt, synthetic construct
  source 1..21: mol_type = other RNA
tccacccttcccaaccccagc

SEQ ID NO: 30113 - RNA, 21 nt, synthetic construct
  source 1..21: mol_type = other RNA
tccagtgcttcaggtctgccg

SEQ ID NO: 30114 - RNA, 21 nt, synthetic construct
  source 1..21: mol_type = other RNA
tcccaaccccagcccacctgc

SEQ ID NO: 30115 - RNA, 21 nt, synthetic construct
  source 1..21: mol_type = other RNA
tcccagaggagcttccggcag

SEQ ID NO: 30116 - RNA, 21 nt, synthetic construct
  source 1..21: mol_type = other RNA
tccctggggcagctgatcaca

SEQ ID NO: 30117 - RNA, 21 nt, synthetic construct
  source 1..21: mol_type = other RNA
tccggcagacctgaagcactg

SEQ ID NO: 30118 - RNA, 21 nt, synthetic construct
  source 1..21: mol_type = other RNA
tcctctccctggggcagctga

SEQ ID NO: 30119 - RNA, 21 nt, synthetic construct
  source 1..21: mol_type = other RNA
tcctctgggaaggctgcagag

SEQ ID NO: 30120 - RNA, 21 nt, synthetic construct
  source 1..21: mol_type = other RNA
tctccctggggcagctgatca

SEQ ID NO: 30121 - RNA, 21 nt, synthetic construct
  source 1..21: mol_type = other RNA
tctctgcagccttcccagagg

SEQ ID NO: 30122 - RNA, 21 nt, synthetic construct
  source 1..21: mol_type = other RNA
tctgcagccttcccagaggag

SEQ ID NO: 30123 - RNA, 21 nt, synthetic construct
  source 1..21: mol_type = other RNA
tctgccggaagctcctctggg

SEQ ID NO: 30124 - RNA, 21 nt, synthetic construct
  source 1..21: mol_type = other RNA
tctgggaaggctgcagagaaa

SEQ ID NO: 30125 - RNA, 21 nt, synthetic construct
  source 1..21: mol_type = other RNA
tgaagcactggaagccaggtg

SEQ ID NO: 30126 - RNA, 21 nt, synthetic construct
  source 1..21: mol_type = other RNA
tgatcacatgttttctctgca

SEQ ID NO: 30127 - RNA, 21 nt, synthetic construct
  source 1..21: mol_type = other RNA
tgatcagctgccccagggaga

SEQ ID NO: 30128 - RNA, 21 nt, synthetic construct
  source 1..21: mol_type = other RNA
tgcacacctggcttccagtgc

SEQ ID NO: 30129 - RNA, 21 nt, synthetic construct
  source 1..21: mol_type = other RNA
tgcagagaaaacatgtgatca

SEQ ID NO: 30130 - RNA, 21 nt, synthetic construct
  source 1..21: mol_type = other RNA
tgcagccttcccagaggagct

SEQ ID NO: 30131 - RNA, 21 nt, synthetic construct
  source 1..21: mol_type = other RNA
tgcagggcaggtgggctgggg

SEQ ID NO: 30132 - RNA, 21 nt, synthetic construct
  source 1..21: mol_type = other RNA
tgccctgcacacctggcttcc

SEQ ID NO: 30133 - RNA, 21 nt, synthetic construct
  source 1..21: mol_type = other RNA
tgccggaagctcctctgggaa

SEQ ID NO: 30134 - RNA, 21 nt, synthetic construct
  source 1..21: mol_type = other RNA
tgcttcaggtctgccggaagc

SEQ ID NO: 30135 - RNA, 21 nt, synthetic construct
  source 1..21: mol_type = other RNA
tggaagccaggtgtgcagggc

SEQ ID NO: 30136 - RNA, 21 nt, synthetic construct
  source 1..21: mol_type = other RNA
tggcttccagtgcttcaggtc

SEQ ID NO: 30137 - RNA, 21 nt, synthetic construct
  source 1..21: mol_type = other RNA
tgggaaggctgcagagaaaac

SEQ ID NO: 30138 - RNA, 21 nt, synthetic construct
  source 1..21: mol_type = other RNA
tgggctggggttgggaagggt

SEQ ID NO: 30139 - RNA, 21 nt, synthetic construct
  source 1..21: mol_type = other RNA
tggggcagctgatcacatgtt

SEQ ID NO: 30140 - RNA, 21 nt, synthetic construct
  source 1..21: mol_type = other RNA
tgtgatcagctgccccaggga

SEQ ID NO: 30141 - RNA, 21 nt, synthetic construct
  source 1..21: mol_type = other RNA
tgtgcagggcaggtgggctgg

SEQ ID NO: 30142 - RNA, 21 nt, synthetic construct
  source 1..21: mol_type = other RNA
tgttttctctgcagccttccc

SEQ ID NO: 30143 - RNA, 21 nt, synthetic construct
  source 1..21: mol_type = other RNA
ttcaggtctgccggaagctcc

SEQ ID NO: 30144 - RNA, 21 nt, synthetic construct
  source 1..21: mol_type = other RNA
ttccagtgcttcaggtctgcc

SEQ ID NO: 30145 - RNA, 21 nt, synthetic construct
  source 1..21: mol_type = other RNA
ttcccaaccccagcccacctg

SEQ ID NO: 30146 - RNA, 21 nt, synthetic construct
  source 1..21: mol_type = other RNA
ttcccagaggagcttccggca

SEQ ID NO: 30147 - RNA, 21 nt, synthetic construct
  source 1..21: mol_type = other RNA
ttccggcagacctgaagcact

SEQ ID NO: 30148 - RNA, 21 nt, synthetic construct
  source 1..21: mol_type = other RNA
ttctctgcagccttcccagag

SEQ ID NO: 30149 - RNA, 21 nt, synthetic construct
  source 1..21: mol_type = other RNA
tttctctgcagccttcccaga

SEQ ID NO: 30150 - RNA, 21 nt, synthetic construct
  source 1..21: mol_type = other RNA
ttttctctgcagccttcccag

SEQ ID NO: 30151 - RNA, 22 nt, synthetic construct
  source 1..22: mol_type = other RNA
aaaacatgtgatcagctgcccc

SEQ ID NO: 30152 - RNA, 22 nt, synthetic construct
  source 1..22: mol_type = other RNA
aaacatgtgatcagctgcccca

SEQ ID NO: 30153 - RNA, 22 nt, synthetic construct
  source 1..22: mol_type = other RNA
aacatgtgatcagctgccccag

SEQ ID NO: 30154 - RNA, 22 nt, synthetic construct
  source 1..22: mol_type = other RNA
aaccccagcccacctgccctgc

SEQ ID NO: 30155 - RNA, 22 nt, synthetic construct
  source 1..22: mol_type = other RNA
aagcactggaagccaggtgtgc

SEQ ID NO: 30156 - RNA, 22 nt, synthetic construct
  source 1..22: mol_type = other RNA
aagccaggtgtgcagggcaggt

SEQ ID NO: 30157 - RNA, 22 nt, synthetic construct
  source 1..22: mol_type = other RNA
aagctcctctgggaaggctgca

SEQ ID NO: 30158 - RNA, 22 nt, synthetic construct
  source 1..22: mol_type = other RNA
aaggcatccacccttcccaacc

SEQ ID NO: 30159 - RNA, 22 nt, synthetic construct
  source 1..22: mol_type = other RNA
aaggctgcagagaaaacatgtg

SEQ ID NO: 30160 - RNA, 22 nt, synthetic construct
  source 1..22: mol_type = other RNA
acacctggcttccagtgcttca

SEQ ID NO: 30161 - RNA, 22 nt, synthetic construct
  source 1..22: mol_type = other RNA
acatcctctccctggggcagct

SEQ ID NO: 30162 - RNA, 22 nt, synthetic construct
  source 1..22: mol_type = other RNA
acatgtgatcagctgccccagg

SEQ ID NO: 30163 - RNA, 22 nt, synthetic construct
  source 1..22: mol_type = other RNA
acatgttttctctgcagccttc

SEQ ID NO: 30164 - RNA, 22 nt, synthetic construct
  source 1..22: mol_type = other RNA
accccagcccacctgccctgca

SEQ ID NO: 30165 - RNA, 22 nt, synthetic construct
  source 1..22: mol_type = other RNA
acccttcccaaccccagcccac

SEQ ID NO: 30166 - RNA, 22 nt, synthetic construct
  source 1..22: mol_type = other RNA
acctgaagcactggaagccagg

SEQ ID NO: 30167 - RNA, 22 nt, synthetic construct
  source 1..22: mol_type = other RNA
acctgccctgcacacctggctt

SEQ ID NO: 30168 - RNA, 22 nt, synthetic construct
  source 1..22: mol_type = other RNA
acctggcttccagtgcttcagg

SEQ ID NO: 30169 - RNA, 22 nt, synthetic construct
  source 1..22: mol_type = other RNA
actggaagccaggtgtgcaggg

SEQ ID NO: 30170 - RNA, 22 nt, synthetic construct
  source 1..22: mol_type = other RNA
agaaaacatgtgatcagctgcc

SEQ ID NO: 30171 - RNA, 22 nt, synthetic construct
  source 1..22: mol_type = other RNA
agacctgaagcactggaagcca

SEQ ID NO: 30172 - RNA, 22 nt, synthetic construct
  source 1..22: mol_type = other RNA
agagaaaacatgtgatcagctg

SEQ ID NO: 30173 - RNA, 22 nt, synthetic construct
  source 1..22: mol_type = other RNA
agaggagcttccggcagacctg

SEQ ID NO: 30174 - RNA, 22 nt, synthetic construct
  source 1..22: mol_type = other RNA
agcactggaagccaggtgtgca

SEQ ID NO: 30175 - RNA, 22 nt, synthetic construct
  source 1..22: mol_type = other RNA
agccaggtgtgcagggcaggtg

SEQ ID NO: 30176 - RNA, 22 nt, synthetic construct
  source 1..22: mol_type = other RNA
agcccacctgccctgcacacct

SEQ ID NO: 30177 - RNA, 22 nt, synthetic construct
  source 1..22: mol_type = other RNA
agccttcccagaggagcttccg

SEQ ID NO: 30178 - RNA, 22 nt, synthetic construct
  source 1..22: mol_type = other RNA
agctcctctgggaaggctgcag

SEQ ID NO: 30179 - RNA, 22 nt, synthetic construct
  source 1..22: mol_type = other RNA
agctgatcacatgttttctctg

SEQ ID NO: 30180 - RNA, 22 nt, synthetic construct
  source 1..22: mol_type = other RNA
agcttccggcagacctgaagca

SEQ ID NO: 30181 - RNA, 22 nt, synthetic construct
  source 1..22: mol_type = other RNA
aggagcttccggcagacctgaa

SEQ ID NO: 30182 - RNA, 22 nt, synthetic construct
  source 1..22: mol_type = other RNA
aggcatccacccttcccaaccc

SEQ ID NO: 30183 - RNA, 22 nt, synthetic construct
  source 1..22: mol_type = other RNA
aggctgcagagaaaacatgtga

SEQ ID NO: 30184 - RNA, 22 nt, synthetic construct
  source 1..22: mol_type = other RNA
agggcaggtgggctggggttgg

SEQ ID NO: 30185 - RNA, 22 nt, synthetic construct
  source 1..22: mol_type = other RNA
aggtctgccggaagctcctctg

SEQ ID NO: 30186 - RNA, 22 nt, synthetic construct
  source 1..22: mol_type = other RNA
aggtgggctggggttgggaagg

SEQ ID NO: 30187 - RNA, 22 nt, synthetic construct
  source 1..22: mol_type = other RNA
aggtgtgcagggcaggtgggct

SEQ ID NO: 30188 - RNA, 22 nt, synthetic construct
  source 1..22: mol_type = other RNA
agtgcttcaggtctgccggaag

SEQ ID NO: 30189 - RNA, 22 nt, synthetic construct
  source 1..22: mol_type = other RNA
atcacatgttttctctgcagcc

SEQ ID NO: 30190 - RNA, 22 nt, synthetic construct
  source 1..22: mol_type = other RNA
atccacccttcccaaccccagc

SEQ ID NO: 30191 - RNA, 22 nt, synthetic construct
  source 1..22: mol_type = other RNA
atcctctccctggggcagctga

SEQ ID NO: 30192 - RNA, 22 nt, synthetic construct
  source 1..22: mol_type = other RNA
atgtgatcagctgccccaggga

SEQ ID NO: 30193 - RNA, 22 nt, synthetic construct
  source 1..22: mol_type = other RNA
atgttttctctgcagccttccc

SEQ ID NO: 30194 - RNA, 22 nt, synthetic construct
  source 1..22: mol_type = other RNA
caaccccagcccacctgccctg

SEQ ID NO: 30195 - RNA, 22 nt, synthetic construct
  source 1..22: mol_type = other RNA
caaggcatccacccttcccaac

SEQ ID NO: 30196 - RNA, 22 nt, synthetic construct
  source 1..22: mol_type = other RNA
cacacctggcttccagtgcttc

SEQ ID NO: 30197 - RNA, 22 nt, synthetic construct
  source 1..22: mol_type = other RNA
cacatgttttctctgcagcctt

SEQ ID NO: 30198 - RNA, 22 nt, synthetic construct
  source 1..22: mol_type = other RNA
cacccttcccaaccccagccca

SEQ ID NO: 30199 - RNA, 22 nt, synthetic construct
  source 1..22: mol_type = other RNA
cacctgccctgcacacctggct

SEQ ID NO: 30200 - RNA, 22 nt, synthetic construct
  source 1..22: mol_type = other RNA
cacctggcttccagtgcttcag

SEQ ID NO: 30201 - RNA, 22 nt, synthetic construct
  source 1..22: mol_type = other RNA
cactggaagccaggtgtgcagg

SEQ ID NO: 30202 - RNA, 22 nt, synthetic construct
  source 1..22: mol_type = other RNA
cagacctgaagcactggaagcc

SEQ ID NO: 30203 - RNA, 22 nt, synthetic construct
  source 1..22: mol_type = other RNA
cagagaaaacatgtgatcagct

SEQ ID NO: 30204 - RNA, 22 nt, synthetic construct
  source 1..22: mol_type = other RNA
cagaggagcttccggcagacct

SEQ ID NO: 30205 - RNA, 22 nt, synthetic construct
  source 1..22: mol_type = other RNA
cagcccacctgccctgcacacc

SEQ ID NO: 30206 - RNA, 22 nt, synthetic construct
  source 1..22: mol_type = other RNA
cagccttcccagaggagcttcc

SEQ ID NO: 30207 - RNA, 22 nt, synthetic construct
  source 1..22: mol_type = other RNA
cagctgatcacatgttttctct

SEQ ID NO: 30208 - RNA, 22 nt, synthetic construct
  source 1..22: mol_type = other RNA
cagggcaggtgggctggggttg

SEQ ID NO: 30209 - RNA, 22 nt, synthetic construct
  source 1..22: mol_type = other RNA
caggtctgccggaagctcctct

SEQ ID NO: 30210 - RNA, 22 nt, synthetic construct
  source 1..22: mol_type = other RNA
caggtgggctggggttgggaag

SEQ ID NO: 30211 - RNA, 22 nt, synthetic construct
  source 1..22: mol_type = other RNA
caggtgtgcagggcaggtgggc

SEQ ID NO: 30212 - RNA, 22 nt, synthetic construct
  source 1..22: mol_type = other RNA
cagtgcttcaggtctgccggaa

SEQ ID NO: 30213 - RNA, 22 nt, synthetic construct
  source 1..22: mol_type = other RNA
catccacccttcccaaccccag

SEQ ID NO: 30214 - RNA, 22 nt, synthetic construct
  source 1..22: mol_type = other RNA
catcctctccctggggcagctg

SEQ ID NO: 30215 - RNA, 22 nt, synthetic construct
  source 1..22: mol_type = other RNA
catgtgatcagctgccccaggg

SEQ ID NO: 30216 - RNA, 22 nt, synthetic construct
  source 1..22: mol_type = other RNA
catgttttctctgcagccttcc

SEQ ID NO: 30217 - RNA, 22 nt, synthetic construct
  source 1..22: mol_type = other RNA
ccaaccccagcccacctgccct

SEQ ID NO: 30218 - RNA, 22 nt, synthetic construct
  source 1..22: mol_type = other RNA
ccacccttcccaaccccagccc

SEQ ID NO: 30219 - RNA, 22 nt, synthetic construct
  source 1..22: mol_type = other RNA
ccacctgccctgcacacctggc

SEQ ID NO: 30220 - RNA, 22 nt, synthetic construct
  source 1..22: mol_type = other RNA
ccagaggagcttccggcagacc

SEQ ID NO: 30221 - RNA, 22 nt, synthetic construct
  source 1..22: mol_type = other RNA
ccagcccacctgccctgcacac

SEQ ID NO: 30222 - RNA, 22 nt, synthetic construct
  source 1..22: mol_type = other RNA
ccaggtgtgcagggcaggtggg

SEQ ID NO: 30223 - RNA, 22 nt, synthetic construct
  source 1..22: mol_type = other RNA
ccagtgcttcaggtctgccgga

SEQ ID NO: 30224 - RNA, 22 nt, synthetic construct
  source 1..22: mol_type = other RNA
cccaaccccagcccacctgccc

SEQ ID NO: 30225 - RNA, 22 nt, synthetic construct
  source 1..22: mol_type = other RNA
cccacctgccctgcacacctgg

SEQ ID NO: 30226 - RNA, 22 nt, synthetic construct
  source 1..22: mol_type = other RNA
cccagaggagcttccggcagac

SEQ ID NO: 30227 - RNA, 22 nt, synthetic construct
  source 1..22: mol_type = other RNA
cccagcccacctgccctgcaca

SEQ ID NO: 30228 - RNA, 22 nt, synthetic construct
  source 1..22: mol_type = other RNA
ccccagcccacctgccctgcac

SEQ ID NO: 30229 - RNA, 22 nt, synthetic construct
  source 1..22: mol_type = other RNA
ccctgcacacctggcttccagt

SEQ ID NO: 30230 - RNA, 22 nt, synthetic construct
  source 1..22: mol_type = other RNA
ccctggggcagctgatcacatg

SEQ ID NO: 30231 - RNA, 22 nt, synthetic construct
  source 1..22: mol_type = other RNA
cccttcccaaccccagcccacc

SEQ ID NO: 30232 - RNA, 22 nt, synthetic construct
  source 1..22: mol_type = other RNA
ccggaagctcctctgggaaggc

SEQ ID NO: 30233 - RNA, 22 nt, synthetic construct
  source 1..22: mol_type = other RNA
ccggcagacctgaagcactgga

SEQ ID NO: 30234 - RNA, 22 nt, synthetic construct
  source 1..22: mol_type = other RNA
cctctccctggggcagctgatc

SEQ ID NO: 30235 - RNA, 22 nt, synthetic construct
  source 1..22: mol_type = other RNA
cctctgggaaggctgcagagaa

SEQ ID NO: 30236 - RNA, 22 nt, synthetic construct
  source 1..22: mol_type = other RNA
cctgaagcactggaagccaggt

SEQ ID NO: 30237 - RNA, 22 nt, synthetic construct
  source 1..22: mol_type = other RNA
cctgcacacctggcttccagtg

SEQ ID NO: 30238 - RNA, 22 nt, synthetic construct
  source 1..22: mol_type = other RNA
cctgccctgcacacctggcttc

SEQ ID NO: 30239 - RNA, 22 nt, synthetic construct
  source 1..22: mol_type = other RNA
cctggcttccagtgcttcaggt

SEQ ID NO: 30240 - RNA, 22 nt, synthetic construct
  source 1..22: mol_type = other RNA
cctggggcagctgatcacatgt

SEQ ID NO: 30241 - RNA, 22 nt, synthetic construct
  source 1..22: mol_type = other RNA
ccttcccaaccccagcccacct

SEQ ID NO: 30242 - RNA, 22 nt, synthetic construct
  source 1..22: mol_type = other RNA
ccttcccagaggagcttccggc

SEQ ID NO: 30243 - RNA, 22 nt, synthetic construct
  source 1..22: mol_type = other RNA
cggaagctcctctgggaaggct

SEQ ID NO: 30244 - RNA, 22 nt, synthetic construct
  source 1..22: mol_type = other RNA
cggcagacctgaagcactggaa

SEQ ID NO: 30245 - RNA, 22 nt, synthetic construct
  source 1..22: mol_type = other RNA
ctccctggggcagctgatcaca

SEQ ID NO: 30246 - RNA, 22 nt, synthetic construct
  source 1..22: mol_type = other RNA
ctcctctgggaaggctgcagag

SEQ ID NO: 30247 - RNA, 22 nt, synthetic construct
  source 1..22: mol_type = other RNA
ctctccctggggcagctgatca

SEQ ID NO: 30248 - RNA, 22 nt, synthetic construct
  source 1..22: mol_type = other RNA
ctctgcagccttcccagaggag

SEQ ID NO: 30249 - RNA, 22 nt, synthetic construct
  source 1..22: mol_type = other RNA
ctctgggaaggctgcagagaaa

SEQ ID NO: 30250 - RNA, 22 nt, synthetic construct
  source 1..22: mol_type = other RNA
ctgaagcactggaagccaggtg

SEQ ID NO: 30251 - RNA, 22 nt, synthetic construct
  source 1..22: mol_type = other RNA
ctgatcacatgttttctctgca

SEQ ID NO: 30252 - RNA, 22 nt, synthetic construct
  source 1..22: mol_type = other RNA
ctgcacacctggcttccagtgc

SEQ ID NO: 30253 - RNA, 22 nt, synthetic construct
  source 1..22: mol_type = other RNA
ctgcagagaaaacatgtgatca

SEQ ID NO: 30254 - RNA, 22 nt, synthetic construct
  source 1..22: mol_type = other RNA
ctgcagccttcccagaggagct

SEQ ID NO: 30255 - RNA, 22 nt, synthetic construct
  source 1..22: mol_type = other RNA
ctgccctgcacacctggcttcc

SEQ ID NO: 30256 - RNA, 22 nt, synthetic construct
  source 1..22: mol_type = other RNA
ctgccggaagctcctctgggaa

SEQ ID NO: 30257 - RNA, 22 nt, synthetic construct
  source 1..22: mol_type = other RNA
ctggaagccaggtgtgcagggc

SEQ ID NO: 30258 - RNA, 22 nt, synthetic construct
  source 1..22: mol_type = other RNA
ctggcttccagtgcttcaggtc

SEQ ID NO: 30259 - RNA, 22 nt, synthetic construct
  source 1..22: mol_type = other RNA
ctgggaaggctgcagagaaaac

SEQ ID NO: 30260 - RNA, 22 nt, synthetic construct
  source 1..22: mol_type = other RNA
ctggggcagctgatcacatgtt

SEQ ID NO: 30261 - RNA, 22 nt, synthetic construct
  source 1..22: mol_type = other RNA
cttcaggtctgccggaagctcc

SEQ ID NO: 30262 - RNA, 22 nt, synthetic construct
  source 1..22: mol_type = other RNA
cttccagtgcttcaggtctgcc

SEQ ID NO: 30263 - RNA, 22 nt, synthetic construct
  source 1..22: mol_type = other RNA
cttcccaaccccagcccacctg

SEQ ID NO: 30264 - RNA, 22 nt, synthetic construct
  source 1..22: mol_type = other RNA
cttcccagaggagcttccggca

SEQ ID NO: 30265 - RNA, 22 nt, synthetic construct
  source 1..22: mol_type = other RNA
cttccggcagacctgaagcact

SEQ ID NO: 30266 - RNA, 22 nt, synthetic construct
  source 1..22: mol_type = other RNA
gaaaacatgtgatcagctgccc

SEQ ID NO: 30267 - RNA, 22 nt, synthetic construct
  source 1..22: mol_type = other RNA
gaagcactggaagccaggtgtg

SEQ ID NO: 30268 - RNA, 22 nt, synthetic construct
  source 1..22: mol_type = other RNA
gaagccaggtgtgcagggcagg

SEQ ID NO: 30269 - RNA, 22 nt, synthetic construct
  source 1..22: mol_type = other RNA
gaagctcctctgggaaggctgc

SEQ ID NO: 30270 - RNA, 22 nt, synthetic construct
  source 1..22: mol_type = other RNA
gaaggctgcagagaaaacatgt

SEQ ID NO: 30271 - RNA, 22 nt, synthetic construct
  source 1..22: mol_type = other RNA
gacatcctctccctggggcagc

SEQ ID NO: 30272 - RNA, 22 nt, synthetic construct
  source 1..22: mol_type = other RNA
gacctgaagcactggaagccag

SEQ ID NO: 30273 - RNA, 22 nt, synthetic construct
  source 1..22: mol_type = other RNA
gagaaaacatgtgatcagctgc

SEQ ID NO: 30274 - RNA, 22 nt, synthetic construct
  source 1..22: mol_type = other RNA
gagcttccggcagacctgaagc

SEQ ID NO: 30275 - RNA, 22 nt, synthetic construct
  source 1..22: mol_type = other RNA
gaggagcttccggcagacctga

SEQ ID NO: 30276 - RNA, 22 nt, synthetic construct
  source 1..22: mol_type = other RNA
gatcacatgttttctctgcagc

SEQ ID NO: 30277 - RNA, 22 nt, synthetic construct
  source 1..22: mol_type = other RNA
gcacacctggcttccagtgctt

SEQ ID NO: 30278 - RNA, 22 nt, synthetic construct
  source 1..22: mol_type = other RNA
gcactggaagccaggtgtgcag

SEQ ID NO: 30279 - RNA, 22 nt, synthetic construct
  source 1..22: mol_type = other RNA
gcagacctgaagcactggaagc

SEQ ID NO: 30280 - RNA, 22 nt, synthetic construct
  source 1..22: mol_type = other RNA
gcagagaaaacatgtgatcagc

SEQ ID NO: 30281 - RNA, 22 nt, synthetic construct
  source 1..22: mol_type = other RNA
gcagccttcccagaggagcttc

SEQ ID NO: 30282 - RNA, 22 nt, synthetic construct
  source 1..22: mol_type = other RNA
gcagctgatcacatgttttctc

SEQ ID NO: 30283 - RNA, 22 nt, synthetic construct
  source 1..22: mol_type = other RNA
gcagggcaggtgggctggggtt

SEQ ID NO: 30284 - RNA, 22 nt, synthetic construct
  source 1..22: mol_type = other RNA
gcaggtgggctggggttgggaa

SEQ ID NO: 30285 - RNA, 22 nt, synthetic construct
  source 1..22: mol_type = other RNA
gcatccacccttcccaacccca

SEQ ID NO: 30286 - RNA, 22 nt, synthetic construct
  source 1..22: mol_type = other RNA
gccaggtgtgcagggcaggtgg

SEQ ID NO: 30287 - RNA, 22 nt, synthetic construct
  source 1..22: mol_type = other RNA
gcccacctgccctgcacacctg

SEQ ID NO: 30288 - RNA, 22 nt, synthetic construct
  source 1..22: mol_type = other RNA
gccctgcacacctggcttccag

SEQ ID NO: 30289 - RNA, 22 nt, synthetic construct
  source 1..22: mol_type = other RNA
gccggaagctcctctgggaagg

SEQ ID NO: 30290 - RNA, 22 nt, synthetic construct
  source 1..22: mol_type = other RNA
gccttcccagaggagcttccgg

SEQ ID NO: 30291 - RNA, 22 nt, synthetic construct
  source 1..22: mol_type = other RNA
gctcctctgggaaggctgcaga

SEQ ID NO: 30292 - RNA, 22 nt, synthetic construct
  source 1..22: mol_type = other RNA
gctgatcacatgttttctctgc

SEQ ID NO: 30293 - RNA, 22 nt, synthetic construct
  source 1..22: mol_type = other RNA
gctgcagagaaaacatgtgatc

SEQ ID NO: 30294 - RNA, 22 nt, synthetic construct
  source 1..22: mol_type = other RNA
gcttcaggtctgccggaagctc

SEQ ID NO: 30295 - RNA, 22 nt, synthetic construct
  source 1..22: mol_type = other RNA
gcttccagtgcttcaggtctgc

SEQ ID NO: 30296 - RNA, 22 nt, synthetic construct
  source 1..22: mol_type = other RNA
gcttccggcagacctgaagcac

SEQ ID NO: 30297 - RNA, 22 nt, synthetic construct
  source 1..22: mol_type = other RNA
ggaagccaggtgtgcagggcag

SEQ ID NO: 30298 - RNA, 22 nt, synthetic construct
  source 1..22: mol_type = other RNA
ggaagctcctctgggaaggctg

SEQ ID NO: 30299 - RNA, 22 nt, synthetic construct
  source 1..22: mol_type = other RNA
ggaaggctgcagagaaaacatg

SEQ ID NO: 30300 - RNA, 22 nt, synthetic construct
  source 1..22: mol_type = other RNA
ggacatcctctccctggggcag

SEQ ID NO: 30301 - RNA, 22 nt, synthetic construct
  source 1..22: mol_type = other RNA
ggagcttccggcagacctgaag

SEQ ID NO: 30302 - RNA, 22 nt, synthetic construct
  source 1..22: mol_type = other RNA
ggcagacctgaagcactggaag

SEQ ID NO: 30303 - RNA, 22 nt, synthetic construct
  source 1..22: mol_type = other RNA
ggcagctgatcacatgttttct

SEQ ID NO: 30304 - RNA, 22 nt, synthetic construct
  source 1..22: mol_type = other RNA
ggcaggtgggctggggttggga

SEQ ID NO: 30305 - RNA, 22 nt, synthetic construct
  source 1..22: mol_type = other RNA
ggcatccacccttcccaacccc

SEQ ID NO: 30306 - RNA, 22 nt, synthetic construct
  source 1..22: mol_type = other RNA
ggctgcagagaaaacatgtgat

SEQ ID NO: 30307 - RNA, 22 nt, synthetic construct
  source 1..22: mol_type = other RNA
ggcttccagtgcttcaggtctg

SEQ ID NO: 30308 - RNA, 22 nt, synthetic construct
  source 1..22: mol_type = other RNA
gggaaggctgcagagaaaacat

SEQ ID NO: 30309 - RNA, 22 nt, synthetic construct
  source 1..22: mol_type = other RNA
gggacatcctctccctggggca

SEQ ID NO: 30310 - RNA, 22 nt, synthetic construct
  source 1..22: mol_type = other RNA
gggcagctgatcacatgttttc

SEQ ID NO: 30311 - RNA, 22 nt, synthetic construct
  source 1..22: mol_type = other RNA
gggcaggtgggctggggttggg

SEQ ID NO: 30312 - RNA, 22 nt, synthetic construct
  source 1..22: mol_type = other RNA
gggctggggttgggaagggtgg

SEQ ID NO: 30313 - RNA, 22 nt, synthetic construct
  source 1..22: mol_type = other RNA
ggggcagctgatcacatgtttt

SEQ ID NO: 30314 - RNA, 22 nt, synthetic construct
  source 1..22: mol_type = other RNA
ggtctgccggaagctcctctgg

SEQ ID NO: 30315 - RNA, 22 nt, synthetic construct
  source 1..22: mol_type = other RNA
ggtgggctggggttgggaaggg

SEQ ID NO: 30316 - RNA, 22 nt, synthetic construct
  source 1..22: mol_type = other RNA
ggtgtgcagggcaggtgggctg

SEQ ID NO: 30317 - RNA, 22 nt, synthetic construct
  source 1..22: mol_type = other RNA
gtctgccggaagctcctctggg

SEQ ID NO: 30318 - RNA, 22 nt, synthetic construct
  source 1..22: mol_type = other RNA
gtgatcagctgccccagggaga

SEQ ID NO: 30319 - RNA, 22 nt, synthetic construct
  source 1..22: mol_type = other RNA
gtgcagggcaggtgggctgggg

SEQ ID NO: 30320 - RNA, 22 nt, synthetic construct
  source 1..22: mol_type = other RNA
gtgcttcaggtctgccggaagc

SEQ ID NO: 30321 - RNA, 22 nt, synthetic construct
  source 1..22: mol_type = other RNA
gtgggctggggttgggaagggt

SEQ ID NO: 30322 - RNA, 22 nt, synthetic construct
  source 1..22: mol_type = other RNA
gtgtgcagggcaggtgggctgg

SEQ ID NO: 30323 - RNA, 22 nt, synthetic construct
  source 1..22: mol_type = other RNA
gttttctctgcagccttcccag

SEQ ID NO: 30324 - RNA, 22 nt, synthetic construct
  source 1..22: mol_type = other RNA
tcacatgttttctctgcagcct

SEQ ID NO: 30325 - RNA, 22 nt, synthetic construct
  source 1..22: mol_type = other RNA
tcaggtctgccggaagctcctc

SEQ ID NO: 30326 - RNA, 22 nt, synthetic construct
  source 1..22: mol_type = other RNA
tccacccttcccaaccccagcc

SEQ ID NO: 30327 - RNA, 22 nt, synthetic construct
  source 1..22: mol_type = other RNA
tccagtgcttcaggtctgccgg

SEQ ID NO: 30328 - RNA, 22 nt, synthetic construct
  source 1..22: mol_type = other RNA
tcccaaccccagcccacctgcc

SEQ ID NO: 30329 - RNA, 22 nt, synthetic construct
  source 1..22: mol_type = other RNA
tcccagaggagcttccggcaga

SEQ ID NO: 30330 - RNA, 22 nt, synthetic construct
  source 1..22: mol_type = other RNA
tccctggggcagctgatcacat

SEQ ID NO: 30331 - RNA, 22 nt, synthetic construct
  source 1..22: mol_type = other RNA
tccggcagacctgaagcactgg

SEQ ID NO: 30332 - RNA, 22 nt, synthetic construct
  source 1..22: mol_type = other RNA
tcctctccctggggcagctgat

SEQ ID NO: 30333 - RNA, 22 nt, synthetic construct
  source 1..22: mol_type = other RNA
tcctctgggaaggctgcagaga

SEQ ID NO: 30334 - RNA, 22 nt, synthetic construct
  source 1..22: mol_type = other RNA
tctccctggggcagctgatcac

SEQ ID NO: 30335 - RNA, 22 nt, synthetic construct
  source 1..22: mol_type = other RNA
tctctgcagccttcccagagga

SEQ ID NO: 30336 - RNA, 22 nt, synthetic construct
  source 1..22: mol_type = other RNA
tctgcagccttcccagaggagc

SEQ ID NO: 30337 - RNA, 22 nt, synthetic construct
  source 1..22: mol_type = other RNA
tctgccggaagctcctctggga

SEQ ID NO: 30338 - RNA, 22 nt, synthetic construct
  source 1..22: mol_type = other RNA
tctgggaaggctgcagagaaaa

SEQ ID NO: 30339 - RNA, 22 nt, synthetic construct
  source 1..22: mol_type = other RNA
tgaagcactggaagccaggtgt

SEQ ID NO: 30340 - RNA, 22 nt, synthetic construct
  source 1..22: mol_type = other RNA
tgatcacatgttttctctgcag

SEQ ID NO: 30341 - RNA, 22 nt, synthetic construct
  source 1..22: mol_type = other RNA
tgatcagctgccccagggagag

SEQ ID NO: 30342 - RNA, 22 nt, synthetic construct
  source 1..22: mol_type = other RNA
tgcacacctggcttccagtgct

SEQ ID NO: 30343 - RNA, 22 nt, synthetic construct
  source 1..22: mol_type = other RNA
tgcagagaaaacatgtgatcag

SEQ ID NO: 30344 - RNA, 22 nt, synthetic construct
  source 1..22: mol_type = other RNA
tgcagccttcccagaggagctt

SEQ ID NO: 30345 - RNA, 22 nt, synthetic construct
  source 1..22: mol_type = other RNA
tgcagggcaggtgggctggggt

SEQ ID NO: 30346 - RNA, 22 nt, synthetic construct
  source 1..22: mol_type = other RNA
tgccctgcacacctggcttcca

SEQ ID NO: 30347 - RNA, 22 nt, synthetic construct
  source 1..22: mol_type = other RNA
tgccggaagctcctctgggaag

SEQ ID NO: 30348 - RNA, 22 nt, synthetic construct
  source 1..22: mol_type = other RNA
tgcttcaggtctgccggaagct

SEQ ID NO: 30349 - RNA, 22 nt, synthetic construct
  source 1..22: mol_type = other RNA
tggaagccaggtgtgcagggca

SEQ ID NO: 30350 - RNA, 22 nt, synthetic construct
  source 1..22: mol_type = other RNA
tggcttccagtgcttcaggtct

SEQ ID NO: 30351 - RNA, 22 nt, synthetic construct
  source 1..22: mol_type = other RNA
tgggaaggctgcagagaaaaca

SEQ ID NO: 30352 - RNA, 22 nt, synthetic construct
  source 1..22: mol_type = other RNA
tgggctggggttgggaagggtg

SEQ ID NO: 30353 - RNA, 22 nt, synthetic construct
  source 1..22: mol_type = other RNA
tggggcagctgatcacatgttt

SEQ ID NO: 30354 - RNA, 22 nt, synthetic construct
  source 1..22: mol_type = other RNA
tgtgatcagctgccccagggag

SEQ ID NO: 30355 - RNA, 22 nt, synthetic construct
  source 1..22: mol_type = other RNA
tgtgcagggcaggtgggctggg

SEQ ID NO: 30356 - RNA, 22 nt, synthetic construct
  source 1..22: mol_type = other RNA
tgttttctctgcagccttccca

SEQ ID NO: 30357 - RNA, 22 nt, synthetic construct
  source 1..22: mol_type = other RNA
ttcaggtctgccggaagctcct

SEQ ID NO: 30358 - RNA, 22 nt, synthetic construct
  source 1..22: mol_type = other RNA
ttccagtgcttcaggtctgccg

SEQ ID NO: 30359 - RNA, 22 nt, synthetic construct
  source 1..22: mol_type = other RNA
ttcccaaccccagcccacctgc

SEQ ID NO: 30360 - RNA, 22 nt, synthetic construct
  source 1..22: mol_type = other RNA
ttcccagaggagcttccggcag

SEQ ID NO: 30361 - RNA, 22 nt, synthetic construct
  source 1..22: mol_type = other RNA
ttccggcagacctgaagcactg

SEQ ID NO: 30362 - RNA, 22 nt, synthetic construct
  source 1..22: mol_type = other RNA
ttctctgcagccttcccagagg

SEQ ID NO: 30363 - RNA, 22 nt, synthetic construct
  source 1..22: mol_type = other RNA
tttctctgcagccttcccagag

SEQ ID NO: 30364 - RNA, 22 nt, synthetic construct
  source 1..22: mol_type = other RNA
ttttctctgcagccttcccaga

SEQ ID NO: 30365 - RNA, 20 nt, synthetic construct
  source 1..20: mol_type = other RNA
aaaaccgaccagattcccag

SEQ ID NO: 30366 - RNA, 20 nt, synthetic construct
  source 1..20: mol_type = other RNA
aaaccgaccagattcccagt

SEQ ID NO: 30367 - RNA, 20 nt, synthetic construct
  source 1..20: mol_type = other RNA
aaagcccactctctccaagc

SEQ ID NO: 30368 - RNA, 20 nt, synthetic construct
  source 1..20: mol_type = other RNA
aacacagcccacttcctcac

SEQ ID NO: 30369 - RNA, 20 nt, synthetic construct
  source 1..20: mol_type = other RNA
aacagcgcaggcagtggcag

SEQ ID NO: 30370 - RNA, 20 nt, synthetic construct
  source 1..20: mol_type = other RNA
aacatactgggaatctggtc

SEQ ID NO: 30371 - RNA, 20 nt, synthetic construct
  source 1..20: mol_type = other RNA
aaccaggagccagcctccgg

SEQ ID NO: 30372 - RNA, 20 nt, synthetic construct
  source 1..20: mol_type = other RNA
aaccgaccagattcccagta

SEQ ID NO: 30373 - RNA, 20 nt, synthetic construct
  source 1..20: mol_type = other RNA
aagagggagaaagcccactc

SEQ ID NO: 30374 - RNA, 20 nt, synthetic construct
  source 1..20: mol_type = other RNA
aagcacccagtctctaacac

SEQ ID NO: 30375 - RNA, 20 nt, synthetic construct
  source 1..20: mol_type = other RNA
aagcccactctctccaagcc

SEQ ID NO: 30376 - RNA, 20 nt, synthetic construct
  source 1..20: mol_type = other RNA
aagccccctaacatactggg

SEQ ID NO: 30377 - RNA, 20 nt, synthetic construct
  source 1..20: mol_type = other RNA
aagtgggctgtgttagagac

SEQ ID NO: 30378 - RNA, 20 nt, synthetic construct
  source 1..20: mol_type = other RNA
aatctggtcggttttctcca

SEQ ID NO: 30379 - RNA, 20 nt, synthetic construct
  source 1..20: mol_type = other RNA
acacagcccacttcctcaca

SEQ ID NO: 30380 - RNA, 20 nt, synthetic construct
  source 1..20: mol_type = other RNA
acagcccacttcctcacagc

SEQ ID NO: 30381 - RNA, 20 nt, synthetic construct
  source 1..20: mol_type = other RNA
acagcgcaggcagtggcagg

SEQ ID NO: 30382 - RNA, 20 nt, synthetic construct
  source 1..20: mol_type = other RNA
acagctgagccccccactgt

SEQ ID NO: 30383 - RNA, 20 nt, synthetic construct
  source 1..20: mol_type = other RNA
acagtggggggctcagctgt

SEQ ID NO: 30384 - RNA, 20 nt, synthetic construct
  source 1..20: mol_type = other RNA
acatactgggaatctggtcg

SEQ ID NO: 30385 - RNA, 20 nt, synthetic construct
  source 1..20: mol_type = other RNA
accacagtggggggctcagc

SEQ ID NO: 30386 - RNA, 20 nt, synthetic construct
  source 1..20: mol_type = other RNA
accagattcccagtatgtta

SEQ ID NO: 30387 - RNA, 20 nt, synthetic construct
  source 1..20: mol_type = other RNA
accaggagccagcctccggc

SEQ ID NO: 30388 - RNA, 20 nt, synthetic construct
  source 1..20: mol_type = other RNA
accagtgagcgactgctcca

SEQ ID NO: 30389 - RNA, 20 nt, synthetic construct
  source 1..20: mol_type = other RNA
acccagtctctaacacagcc

SEQ ID NO: 30390 - RNA, 20 nt, synthetic construct
  source 1..20: mol_type = other RNA
accctgccctgcctgccact

SEQ ID NO: 30391 - RNA, 20 nt, synthetic construct
  source 1..20: mol_type = other RNA
accgaccagattcccagtat

SEQ ID NO: 30392 - RNA, 20 nt, synthetic construct
  source 1..20: mol_type = other RNA
actaggagactgccagtcac

SEQ ID NO: 30393 - RNA, 20 nt, synthetic construct
  source 1..20: mol_type = other RNA
actctctccaagccccctaa

SEQ ID NO: 30394 - RNA, 20 nt, synthetic construct
  source 1..20: mol_type = other RNA
actgccagtcaccacagtgg

SEQ ID NO: 30395 - RNA, 20 nt, synthetic construct
  source 1..20: mol_type = other RNA
actgcctgcgctgttcaacc

SEQ ID NO: 30396 - RNA, 20 nt, synthetic construct
  source 1..20: mol_type = other RNA
actgctccaccctgccctgc

SEQ ID NO: 30397 - RNA, 20 nt, synthetic construct
  source 1..20: mol_type = other RNA
actggcagtctcctagtggg

SEQ ID NO: 30398 - RNA, 20 nt, synthetic construct
  source 1..20: mol_type = other RNA
actgggaatctggtcggttt

SEQ ID NO: 30399 - RNA, 20 nt, synthetic construct
  source 1..20: mol_type = other RNA
actggtcccactaggagact

SEQ ID NO: 30400 - RNA, 20 nt, synthetic construct
  source 1..20: mol_type = other RNA
actgtggtgactggcagtct

SEQ ID NO: 30401 - RNA, 20 nt, synthetic construct
  source 1..20: mol_type = other RNA
acttcctcacagctgagccc

SEQ ID NO: 30402 - RNA, 20 nt, synthetic construct
  source 1..20: mol_type = other RNA
agaaaaccgaccagattccc

SEQ ID NO: 30403 - RNA, 20 nt, synthetic construct
  source 1..20: mol_type = other RNA
agaaagcccactctctccaa

SEQ ID NO: 30404 - RNA, 20 nt, synthetic construct
  source 1..20: mol_type = other RNA
agactgccagtcaccacagt

SEQ ID NO: 30405 - RNA, 20 nt, synthetic construct
  source 1..20: mol_type = other RNA
agagggagaaagcccactct

SEQ ID NO: 30406 - RNA, 20 nt, synthetic construct
  source 1..20: mol_type = other RNA
agatgcgcctggagaaaacc

SEQ ID NO: 30407 - RNA, 20 nt, synthetic construct
  source 1..20: mol_type = other RNA
agattcccagtatgttaggg

SEQ ID NO: 30408 - RNA, 20 nt, synthetic construct
  source 1..20: mol_type = other RNA
agcacccagtctctaacaca

SEQ ID NO: 30409 - RNA, 20 nt, synthetic construct
  source 1..20: mol_type = other RNA
agcagtcgctcactggtccc

SEQ ID NO: 30410 - RNA, 20 nt, synthetic construct
  source 1..20: mol_type = other RNA
agccagcctccggccagatg

SEQ ID NO: 30411 - RNA, 20 nt, synthetic construct
  source 1..20: mol_type = other RNA
agcccactctctccaagccc

SEQ ID NO: 30412 - RNA, 20 nt, synthetic construct
  source 1..20: mol_type = other RNA
agcccacttcctcacagctg

SEQ ID NO: 30413 - RNA, 20 nt, synthetic construct
  source 1..20: mol_type = other RNA
agccccccactgtggtgact

SEQ ID NO: 30414 - RNA, 20 nt, synthetic construct
  source 1..20: mol_type = other RNA
agccccctaacatactggga

SEQ ID NO: 30415 - RNA, 20 nt, synthetic construct
  source 1..20: mol_type = other RNA
agcctccggccagatgcgcc

SEQ ID NO: 30416 - RNA, 20 nt, synthetic construct
  source 1..20: mol_type = other RNA
agcgactgctccaccctgcc

SEQ ID NO: 30417 - RNA, 20 nt, synthetic construct
  source 1..20: mol_type = other RNA
agcgcaggcagtggcaggca

SEQ ID NO: 30418 - RNA, 20 nt, synthetic construct
  source 1..20: mol_type = other RNA
agctgagccccccactgtgg

SEQ ID NO: 30419 - RNA, 20 nt, synthetic construct
  source 1..20: mol_type = other RNA
agctgtgaggaagtgggctg

SEQ ID NO: 30420 - RNA, 20 nt, synthetic construct
  source 1..20: mol_type = other RNA
aggaagtgggctgtgttaga

SEQ ID NO: 30421 - RNA, 20 nt, synthetic construct
  source 1..20: mol_type = other RNA
aggagactgccagtcaccac

SEQ ID NO: 30422 - RNA, 20 nt, synthetic construct
  source 1..20: mol_type = other RNA
aggagccagcctccggccag

SEQ ID NO: 30423 - RNA, 20 nt, synthetic construct
  source 1..20: mol_type = other RNA
aggcagggcagggtggagca

SEQ ID NO: 30424 - RNA, 20 nt, synthetic construct
  source 1..20: mol_type = other RNA
aggcagtggcaggcagggca

SEQ ID NO: 30425 - RNA, 20 nt, synthetic construct
  source 1..20: mol_type = other RNA
aggcgcatctggccggaggc

SEQ ID NO: 30426 - RNA, 20 nt, synthetic construct
  source 1..20: mol_type = other RNA
aggctggctcctggttgaac

SEQ ID NO: 30427 - RNA, 20 nt, synthetic construct
  source 1..20: mol_type = other RNA
agggagaaagcccactctct

SEQ ID NO: 30428 - RNA, 20 nt, synthetic construct
  source 1..20: mol_type = other RNA
agggcagggtggagcagtcg

SEQ ID NO: 30429 - RNA, 20 nt, synthetic construct
  source 1..20: mol_type = other RNA
agggggcttggagagagtgg

SEQ ID NO: 30430 - RNA, 20 nt, synthetic construct
  source 1..20: mol_type = other RNA
agggtggagcagtcgctcac

SEQ ID NO: 30431 - RNA, 20 nt, synthetic construct
  source 1..20: mol_type = other RNA
agtatgttagggggcttgga

SEQ ID NO: 30432 - RNA, 20 nt, synthetic construct
  source 1..20: mol_type = other RNA
agtcaccacagtggggggct

SEQ ID NO: 30433 - RNA, 20 nt, synthetic construct
  source 1..20: mol_type = other RNA
agtcgctcactggtcccact

SEQ ID NO: 30434 - RNA, 20 nt, synthetic construct
  source 1..20: mol_type = other RNA
agtctcctagtgggaccagt

SEQ ID NO: 30435 - RNA, 20 nt, synthetic construct
  source 1..20: mol_type = other RNA
agtctctaacacagcccact

SEQ ID NO: 30436 - RNA, 20 nt, synthetic construct
  source 1..20: mol_type = other RNA
agtgagcgactgctccaccc

SEQ ID NO: 30437 - RNA, 20 nt, synthetic construct
  source 1..20: mol_type = other RNA
agtggcaggcagggcagggt

SEQ ID NO: 30438 - RNA, 20 nt, synthetic construct
  source 1..20: mol_type = other RNA
agtgggaccagtgagcgact

SEQ ID NO: 30439 - RNA, 20 nt, synthetic construct
  source 1..20: mol_type = other RNA
agtgggctgtgttagagact

SEQ ID NO: 30440 - RNA, 20 nt, synthetic construct
  source 1..20: mol_type = other RNA
agtggggggctcagctgtga

SEQ ID NO: 30441 - RNA, 20 nt, synthetic construct
  source 1..20: mol_type = other RNA
atactgggaatctggtcggt

SEQ ID NO: 30442 - RNA, 20 nt, synthetic construct
  source 1..20: mol_type = other RNA
atctggccggaggctggctc

SEQ ID NO: 30443 - RNA, 20 nt, synthetic construct
  source 1..20: mol_type = other RNA
atctggtcggttttctccag

SEQ ID NO: 30444 - RNA, 20 nt, synthetic construct
  source 1..20: mol_type = other RNA
atgcgcctggagaaaaccga

SEQ ID NO: 30445 - RNA, 20 nt, synthetic construct
  source 1..20: mol_type = other RNA
atgttagggggcttggagag

SEQ ID NO: 30446 - RNA, 20 nt, synthetic construct
  source 1..20: mol_type = other RNA
attcccagtatgttaggggg

SEQ ID NO: 30447 - RNA, 20 nt, synthetic construct
  source 1..20: mol_type = other RNA
caaccaggagccagcctccg

SEQ ID NO: 30448 - RNA, 20 nt, synthetic construct
  source 1..20: mol_type = other RNA
caagagggagaaagcccact

SEQ ID NO: 30449 - RNA, 20 nt, synthetic construct
  source 1..20: mol_type = other RNA
caagcacccagtctctaaca

SEQ ID NO: 30450 - RNA, 20 nt, synthetic construct
  source 1..20: mol_type = other RNA
caagccccctaacatactgg

SEQ ID NO: 30451 - RNA, 20 nt, synthetic construct
  source 1..20: mol_type = other RNA
cacagcccacttcctcacag

SEQ ID NO: 30452 - RNA, 20 nt, synthetic construct
  source 1..20: mol_type = other RNA
cacagctgagccccccactg

SEQ ID NO: 30453 - RNA, 20 nt, synthetic construct
  source 1..20: mol_type = other RNA
cacagtggggggctcagctg

SEQ ID NO: 30454 - RNA, 20 nt, synthetic construct
  source 1..20: mol_type = other RNA
caccacagtggggggctcag

SEQ ID NO: 30455 - RNA, 20 nt, synthetic construct
  source 1..20: mol_type = other RNA
cacccagtctctaacacagc

SEQ ID NO: 30456 - RNA, 20 nt, synthetic construct
  source 1..20: mol_type = other RNA
caccctgccctgcctgccac

SEQ ID NO: 30457 - RNA, 20 nt, synthetic construct
  source 1..20: mol_type = other RNA
cactaggagactgccagtca

SEQ ID NO: 30458 - RNA, 20 nt, synthetic construct
  source 1..20: mol_type = other RNA
cactctctccaagcccccta

SEQ ID NO: 30459 - RNA, 20 nt, synthetic construct
  source 1..20: mol_type = other RNA
cactgcctgcgctgttcaac

SEQ ID NO: 30460 - RNA, 20 nt, synthetic construct
  source 1..20: mol_type = other RNA
cactggtcccactaggagac

SEQ ID NO: 30461 - RNA, 20 nt, synthetic construct
  source 1..20: mol_type = other RNA
cactgtggtgactggcagtc

SEQ ID NO: 30462 - RNA, 20 nt, synthetic construct
  source 1..20: mol_type = other RNA
cacttcctcacagctgagcc

SEQ ID NO: 30463 - RNA, 20 nt, synthetic construct
  source 1..20: mol_type = other RNA
cagatgcgcctggagaaaac

SEQ ID NO: 30464 - RNA, 20 nt, synthetic construct
  source 1..20: mol_type = other RNA
cagattcccagtatgttagg

SEQ ID NO: 30465 - RNA, 20 nt, synthetic construct
  source 1..20: mol_type = other RNA
cagcccacttcctcacagct

SEQ ID NO: 30466 - RNA, 20 nt, synthetic construct
  source 1..20: mol_type = other RNA
cagcctccggccagatgcgc

SEQ ID NO: 30467 - RNA, 20 nt, synthetic construct
  source 1..20: mol_type = other RNA
cagcgcaggcagtggcaggc

SEQ ID NO: 30468 - RNA, 20 nt, synthetic construct
  source 1..20: mol_type = other RNA
cagctgagccccccactgtg

SEQ ID NO: 30469 - RNA, 20 nt, synthetic construct
  source 1..20: mol_type = other RNA
cagctgtgaggaagtgggct

SEQ ID NO: 30470 - RNA, 20 nt, synthetic construct
  source 1..20: mol_type = other RNA
caggagccagcctccggcca

SEQ ID NO: 30471 - RNA, 20 nt, synthetic construct
  source 1..20: mol_type = other RNA
caggcagggcagggtggagc

SEQ ID NO: 30472 - RNA, 20 nt, synthetic construct
  source 1..20: mol_type = other RNA
caggcagtggcaggcagggc

SEQ ID NO: 30473 - RNA, 20 nt, synthetic construct
  source 1..20: mol_type = other RNA
caggcgcatctggccggagg

SEQ ID NO: 30474 - RNA, 20 nt, synthetic construct
  source 1..20: mol_type = other RNA
cagggcagggtggagcagtc

SEQ ID NO: 30475 - RNA, 20 nt, synthetic construct
  source 1..20: mol_type = other RNA
cagggtggagcagtcgctca

SEQ ID NO: 30476 - RNA, 20 nt, synthetic construct
  source 1..20: mol_type = other RNA
cagtatgttagggggcttgg

SEQ ID NO: 30477 - RNA, 20 nt, synthetic construct
  source 1..20: mol_type = other RNA
cagtcaccacagtggggggc

SEQ ID NO: 30478 - RNA, 20 nt, synthetic construct
  source 1..20: mol_type = other RNA
cagtcgctcactggtcccac

SEQ ID NO: 30479 - RNA, 20 nt, synthetic construct
  source 1..20: mol_type = other RNA
cagtctcctagtgggaccag

SEQ ID NO: 30480 - RNA, 20 nt, synthetic construct
  source 1..20: mol_type = other RNA
cagtctctaacacagcccac

SEQ ID NO: 30481 - RNA, 20 nt, synthetic construct
  source 1..20: mol_type = other RNA
cagtgagcgactgctccacc

SEQ ID NO: 30482 - RNA, 20 nt, synthetic construct
  source 1..20: mol_type = other RNA
cagtggcaggcagggcaggg

SEQ ID NO: 30483 - RNA, 20 nt, synthetic construct
  source 1..20: mol_type = other RNA
cagtggggggctcagctgtg

SEQ ID NO: 30484 - RNA, 20 nt, synthetic construct
  source 1..20: mol_type = other RNA
catactgggaatctggtcgg

SEQ ID NO: 30485 - RNA, 20 nt, synthetic construct
  source 1..20: mol_type = other RNA
catctggccggaggctggct

SEQ ID NO: 30486 - RNA, 20 nt, synthetic construct
  source 1..20: mol_type = other RNA
ccaagagggagaaagcccac

SEQ ID NO: 30487 - RNA, 20 nt, synthetic construct
  source 1..20: mol_type = other RNA
ccaagcacccagtctctaac

SEQ ID NO: 30488 - RNA, 20 nt, synthetic construct
  source 1..20: mol_type = other RNA
ccaagccccctaacatactg

SEQ ID NO: 30489 - RNA, 20 nt, synthetic construct
  source 1..20: mol_type = other RNA
ccacagtggggggctcagct

SEQ ID NO: 30490 - RNA, 20 nt, synthetic construct
  source 1..20: mol_type = other RNA
ccaccctgccctgcctgcca

SEQ ID NO: 30491 - RNA, 20 nt, synthetic construct
  source 1..20: mol_type = other RNA
ccactaggagactgccagtc

SEQ ID NO: 30492 - RNA, 20 nt, synthetic construct
  source 1..20: mol_type = other RNA
ccactctctccaagccccct

SEQ ID NO: 30493 - RNA, 20 nt, synthetic construct
  source 1..20: mol_type = other RNA
ccactgcctgcgctgttcaa

SEQ ID NO: 30494 - RNA, 20 nt, synthetic construct
  source 1..20: mol_type = other RNA
ccactgtggtgactggcagt

SEQ ID NO: 30495 - RNA, 20 nt, synthetic construct
  source 1..20: mol_type = other RNA
ccacttcctcacagctgagc

SEQ ID NO: 30496 - RNA, 20 nt, synthetic construct
  source 1..20: mol_type = other RNA
ccagatgcgcctggagaaaa

SEQ ID NO: 30497 - RNA, 20 nt, synthetic construct
  source 1..20: mol_type = other RNA
ccagattcccagtatgttag

SEQ ID NO: 30498 - RNA, 20 nt, synthetic construct
  source 1..20: mol_type = other RNA
ccagcctccggccagatgcg

SEQ ID NO: 30499 - RNA, 20 nt, synthetic construct
  source 1..20: mol_type = other RNA
ccaggagccagcctccggcc

SEQ ID NO: 30500 - RNA, 20 nt, synthetic construct
  source 1..20: mol_type = other RNA
ccaggcgcatctggccggag

SEQ ID NO: 30501 - RNA, 20 nt, synthetic construct
  source 1..20: mol_type = other RNA
ccagtatgttagggggcttg

SEQ ID NO: 30502 - RNA, 20 nt, synthetic construct
  source 1..20: mol_type = other RNA
ccagtcaccacagtgggggg

SEQ ID NO: 30503 - RNA, 20 nt, synthetic construct
  source 1..20: mol_type = other RNA
ccagtctctaacacagccca

SEQ ID NO: 30504 - RNA, 20 nt, synthetic construct
  source 1..20: mol_type = other RNA
ccagtgagcgactgctccac

SEQ ID NO: 30505 - RNA, 20 nt, synthetic construct
  source 1..20: mol_type = other RNA
cccaagagggagaaagccca

SEQ ID NO: 30506 - RNA, 20 nt, synthetic construct
  source 1..20: mol_type = other RNA
cccactaggagactgccagt

SEQ ID NO: 30507 - RNA, 20 nt, synthetic construct
  source 1..20: mol_type = other RNA
cccactctctccaagccccc

SEQ ID NO: 30508 - RNA, 20 nt, synthetic construct
  source 1..20: mol_type = other RNA
cccactgtggtgactggcag

SEQ ID NO: 30509 - RNA, 20 nt, synthetic construct
  source 1..20: mol_type = other RNA
cccacttcctcacagctgag

SEQ ID NO: 30510 - RNA, 20 nt, synthetic construct
  source 1..20: mol_type = other RNA
cccagtatgttagggggctt

SEQ ID NO: 30511 - RNA, 20 nt, synthetic construct
  source 1..20: mol_type = other RNA
cccagtctctaacacagccc

SEQ ID NO: 30512 - RNA, 20 nt, synthetic construct
  source 1..20: mol_type = other RNA
ccccactgtggtgactggca

SEQ ID NO: 30513 - RNA, 20 nt, synthetic construct
  source 1..20: mol_type = other RNA
cccccactgtggtgactggc

SEQ ID NO: 30514 - RNA, 20 nt, synthetic construct
  source 1..20: mol_type = other RNA
ccccccactgtggtgactgg

SEQ ID NO: 30515 - RNA, 20 nt, synthetic construct
  source 1..20: mol_type = other RNA
ccccctaacatactgggaat

SEQ ID NO: 30516 - RNA, 20 nt, synthetic construct
  source 1..20: mol_type = other RNA
cccctaacatactgggaatc

SEQ ID NO: 30517 - RNA, 20 nt, synthetic construct
  source 1..20: mol_type = other RNA
cccctccaagcacccagtct

SEQ ID NO: 30518 - RNA, 20 nt, synthetic construct
  source 1..20: mol_type = other RNA
ccctaacatactgggaatct

SEQ ID NO: 30519 - RNA, 20 nt, synthetic construct
  source 1..20: mol_type = other RNA
ccctccaagcacccagtctc

SEQ ID NO: 30520 - RNA, 20 nt, synthetic construct
  source 1..20: mol_type = other RNA
ccctgccctgcctgccactg

SEQ ID NO: 30521 - RNA, 20 nt, synthetic construct
  source 1..20: mol_type = other RNA
ccctgcctgccactgcctgc

SEQ ID NO: 30522 - RNA, 20 nt, synthetic construct
  source 1..20: mol_type = other RNA
ccgaccagattcccagtatg

SEQ ID NO: 30523 - RNA, 20 nt, synthetic construct
  source 1..20: mol_type = other RNA
ccggaggctggctcctggtt

SEQ ID NO: 30524 - RNA, 20 nt, synthetic construct
  source 1..20: mol_type = other RNA
ccggccagatgcgcctggag

SEQ ID NO: 30525 - RNA, 20 nt, synthetic construct
  source 1..20: mol_type = other RNA
cctaacatactgggaatctg

SEQ ID NO: 30526 - RNA, 20 nt, synthetic construct
  source 1..20: mol_type = other RNA
cctagtgggaccagtgagcg

SEQ ID NO: 30527 - RNA, 20 nt, synthetic construct
  source 1..20: mol_type = other RNA
cctcacagctgagcccccca

SEQ ID NO: 30528 - RNA, 20 nt, synthetic construct
  source 1..20: mol_type = other RNA
cctccaagcacccagtctct

SEQ ID NO: 30529 - RNA, 20 nt, synthetic construct
  source 1..20: mol_type = other RNA
cctccggccagatgcgcctg

SEQ ID NO: 30530 - RNA, 20 nt, synthetic construct
  source 1..20: mol_type = other RNA
cctgccactgcctgcgctgt

SEQ ID NO: 30531 - RNA, 20 nt, synthetic construct
  source 1..20: mol_type = other RNA
cctgccctgcctgccactgc

SEQ ID NO: 30532 - RNA, 20 nt, synthetic construct
  source 1..20: mol_type = other RNA
cctgcctgccactgcctgcg

SEQ ID NO: 30533 - RNA, 20 nt, synthetic construct
  source 1..20: mol_type = other RNA
cctgcgctgttcaaccagga

SEQ ID NO: 30534 - RNA, 20 nt, synthetic construct
  source 1..20: mol_type = other RNA
cctggagaaaaccgaccaga

SEQ ID NO: 30535 - RNA, 20 nt, synthetic construct
  source 1..20: mol_type = other RNA
cctggttgaacagcgcaggc

SEQ ID NO: 30536 - RNA, 20 nt, synthetic construct
  source 1..20: mol_type = other RNA
cgaccagattcccagtatgt

SEQ ID NO: 30537 - RNA, 20 nt, synthetic construct
  source 1..20: mol_type = other RNA
cgactgctccaccctgccct

SEQ ID NO: 30538 - RNA, 20 nt, synthetic construct
  source 1..20: mol_type = other RNA
cgcaggcagtggcaggcagg

SEQ ID NO: 30539 - RNA, 20 nt, synthetic construct
  source 1..20: mol_type = other RNA
cgcatctggccggaggctgg

SEQ ID NO: 30540 - RNA, 20 nt, synthetic construct
  source 1..20: mol_type = other RNA
cgcctggagaaaaccgacca

SEQ ID NO: 30541 - RNA, 20 nt, synthetic construct
  source 1..20: mol_type = other RNA
cgctcactggtcccactagg

SEQ ID NO: 30542 - RNA, 20 nt, synthetic construct
  source 1..20: mol_type = other RNA
cgctgttcaaccaggagcca

SEQ ID NO: 30543 - RNA, 20 nt, synthetic construct
  source 1..20: mol_type = other RNA
cggaggctggctcctggttg

SEQ ID NO: 30544 - RNA, 20 nt, synthetic construct
  source 1..20: mol_type = other RNA
cggccagatgcgcctggaga

SEQ ID NO: 30545 - RNA, 20 nt, synthetic construct
  source 1..20: mol_type = other RNA
cggttttctccaggcgcatc

SEQ ID NO: 30546 - RNA, 20 nt, synthetic construct
  source 1..20: mol_type = other RNA
ctaacacagcccacttcctc

SEQ ID NO: 30547 - RNA, 20 nt, synthetic construct
  source 1..20: mol_type = other RNA
ctaacatactgggaatctgg

SEQ ID NO: 30548 - RNA, 20 nt, synthetic construct
  source 1..20: mol_type = other RNA
ctaggagactgccagtcacc

SEQ ID NO: 30549 - RNA, 20 nt, synthetic construct
  source 1..20: mol_type = other RNA
ctagtgggaccagtgagcga

SEQ ID NO: 30550 - RNA, 20 nt, synthetic construct
  source 1..20: mol_type = other RNA
ctcacagctgagccccccac

SEQ ID NO: 30551 - RNA, 20 nt, synthetic construct
  source 1..20: mol_type = other RNA
ctcactggtcccactaggag

SEQ ID NO: 30552 - RNA, 20 nt, synthetic construct
  source 1..20: mol_type = other RNA
ctcagctgtgaggaagtggg

SEQ ID NO: 30553 - RNA, 20 nt, synthetic construct
  source 1..20: mol_type = other RNA
ctccaagcacccagtctcta

SEQ ID NO: 30554 - RNA, 20 nt, synthetic construct
  source 1..20: mol_type = other RNA
ctccaagccccctaacatac

SEQ ID NO: 30555 - RNA, 20 nt, synthetic construct
  source 1..20: mol_type = other RNA
ctccaccctgccctgcctgc

SEQ ID NO: 30556 - RNA, 20 nt, synthetic construct
  source 1..20: mol_type = other RNA
ctccaggcgcatctggccgg

SEQ ID NO: 30557 - RNA, 20 nt, synthetic construct
  source 1..20: mol_type = other RNA
ctccggccagatgcgcctgg

SEQ ID NO: 30558 - RNA, 20 nt, synthetic construct
  source 1..20: mol_type = other RNA
ctcctagtgggaccagtgag

SEQ ID NO: 30559 - RNA, 20 nt, synthetic construct
  source 1..20: mol_type = other RNA
ctcctggttgaacagcgcag

SEQ ID NO: 30560 - RNA, 20 nt, synthetic construct
  source 1..20: mol_type = other RNA
ctctaacacagcccacttcc

SEQ ID NO: 30561 - RNA, 20 nt, synthetic construct
  source 1..20: mol_type = other RNA
ctctccaagccccctaacat

SEQ ID NO: 30562 - RNA, 20 nt, synthetic construct
  source 1..20: mol_type = other RNA
ctctctccaagccccctaac

SEQ ID NO: 30563 - RNA, 20 nt, synthetic construct
  source 1..20: mol_type = other RNA
ctgagccccccactgtggtg

SEQ ID NO: 30564 - RNA, 20 nt, synthetic construct
  source 1..20: mol_type = other RNA
ctgccactgcctgcgctgtt

SEQ ID NO: 30565 - RNA, 20 nt, synthetic construct
  source 1..20: mol_type = other RNA
ctgccagtcaccacagtggg

SEQ ID NO: 30566 - RNA, 20 nt, synthetic construct
  source 1..20: mol_type = other RNA
ctgccctgcctgccactgcc

SEQ ID NO: 30567 - RNA, 20 nt, synthetic construct
  source 1..20: mol_type = other RNA
ctgcctgccactgcctgcgc

SEQ ID NO: 30568 - RNA, 20 nt, synthetic construct
  source 1..20: mol_type = other RNA
ctgcctgcgctgttcaacca

SEQ ID NO: 30569 - RNA, 20 nt, synthetic construct
  source 1..20: mol_type = other RNA
ctgcgctgttcaaccaggag

SEQ ID NO: 30570 - RNA, 20 nt, synthetic construct
  source 1..20: mol_type = other RNA
ctgctccaccctgccctgcc

SEQ ID NO: 30571 - RNA, 20 nt, synthetic construct
  source 1..20: mol_type = other RNA
ctggagaaaaccgaccagat

SEQ ID NO: 30572 - RNA, 20 nt, synthetic construct
  source 1..20: mol_type = other RNA
ctggcagtctcctagtggga

SEQ ID NO: 30573 - RNA, 20 nt, synthetic construct
  source 1..20: mol_type = other RNA
ctggccggaggctggctcct

SEQ ID NO: 30574 - RNA, 20 nt, synthetic construct
  source 1..20: mol_type = other RNA
ctggctcctggttgaacagc

SEQ ID NO: 30575 - RNA, 20 nt, synthetic construct
  source 1..20: mol_type = other RNA
ctgggaatctggtcggtttt

SEQ ID NO: 30576 - RNA, 20 nt, synthetic construct
  source 1..20: mol_type = other RNA
ctggtcccactaggagactg

SEQ ID NO: 30577 - RNA, 20 nt, synthetic construct
  source 1..20: mol_type = other RNA
ctggtcggttttctccaggc

SEQ ID NO: 30578 - RNA, 20 nt, synthetic construct
  source 1..20: mol_type = other RNA
ctggttgaacagcgcaggca

SEQ ID NO: 30579 - RNA, 20 nt, synthetic construct
  source 1..20: mol_type = other RNA
ctgtgaggaagtgggctgtg

SEQ ID NO: 30580 - RNA, 20 nt, synthetic construct
  source 1..20: mol_type = other RNA
ctgtggtgactggcagtctc

SEQ ID NO: 30581 - RNA, 20 nt, synthetic construct
  source 1..20: mol_type = other RNA
ctgtgttagagactgggtgc

SEQ ID NO: 30582 - RNA, 20 nt, synthetic construct
  source 1..20: mol_type = other RNA
ctgttcaaccaggagccagc

SEQ ID NO: 30583 - RNA, 20 nt, synthetic construct
  source 1..20: mol_type = other RNA
cttcctcacagctgagcccc

SEQ ID NO: 30584 - RNA, 20 nt, synthetic construct
  source 1..20: mol_type = other RNA
cttggagagagtgggctttc

SEQ ID NO: 30585 - RNA, 20 nt, synthetic construct
  source 1..20: mol_type = other RNA
gaaaaccgaccagattccca

SEQ ID NO: 30586 - RNA, 20 nt, synthetic construct
  source 1..20: mol_type = other RNA
gaaagcccactctctccaag

SEQ ID NO: 30587 - RNA, 20 nt, synthetic construct
  source 1..20: mol_type = other RNA
gaacagcgcaggcagtggca

SEQ ID NO: 30588 - RNA, 20 nt, synthetic construct
  source 1..20: mol_type = other RNA
gaagtgggctgtgttagaga

SEQ ID NO: 30589 - RNA, 20 nt, synthetic construct
  source 1..20: mol_type = other RNA
gaatctggtcggttttctcc

SEQ ID NO: 30590 - RNA, 20 nt, synthetic construct
  source 1..20: mol_type = other RNA
gaccagattcccagtatgtt

SEQ ID NO: 30591 - RNA, 20 nt, synthetic construct
  source 1..20: mol_type = other RNA
gaccagtgagcgactgctcc

SEQ ID NO: 30592 - RNA, 20 nt, synthetic construct
  source 1..20: mol_type = other RNA
gactgccagtcaccacagtg

SEQ ID NO: 30593 - RNA, 20 nt, synthetic construct
  source 1..20: mol_type = other RNA
gactgctccaccctgccctg

SEQ ID NO: 30594 - RNA, 20 nt, synthetic construct
  source 1..20: mol_type = other RNA
gactggcagtctcctagtgg

SEQ ID NO: 30595 - RNA, 20 nt, synthetic construct
  source 1..20: mol_type = other RNA
gagaaaaccgaccagattcc

SEQ ID NO: 30596 - RNA, 20 nt, synthetic construct
  source 1..20: mol_type = other RNA
gagaaagcccactctctcca

SEQ ID NO: 30597 - RNA, 20 nt, synthetic construct
  source 1..20: mol_type = other RNA
gagactgccagtcaccacag

SEQ ID NO: 30598 - RNA, 20 nt, synthetic construct
  source 1..20: mol_type = other RNA
gagagagtgggctttctccc

SEQ ID NO: 30599 - RNA, 20 nt, synthetic construct
  source 1..20: mol_type = other RNA
gagcagtcgctcactggtcc

SEQ ID NO: 30600 - RNA, 20 nt, synthetic construct
  source 1..20: mol_type = other RNA
gagccagcctccggccagat

SEQ ID NO: 30601 - RNA, 20 nt, synthetic construct
  source 1..20: mol_type = other RNA
gagccccccactgtggtgac

SEQ ID NO: 30602 - RNA, 20 nt, synthetic construct
  source 1..20: mol_type = other RNA
gagcgactgctccaccctgc

SEQ ID NO: 30603 - RNA, 20 nt, synthetic construct
  source 1..20: mol_type = other RNA
gaggaagtgggctgtgttag

SEQ ID NO: 30604 - RNA, 20 nt, synthetic construct
  source 1..20: mol_type = other RNA
gaggctggctcctggttgaa

SEQ ID NO: 30605 - RNA, 20 nt, synthetic construct
  source 1..20: mol_type = other RNA
gagggagaaagcccactctc

SEQ ID NO: 30606 - RNA, 20 nt, synthetic construct
  source 1..20: mol_type = other RNA
gatgcgcctggagaaaaccg

SEQ ID NO: 30607 - RNA, 20 nt, synthetic construct
  source 1..20: mol_type = other RNA
gattcccagtatgttagggg

SEQ ID NO: 30608 - RNA, 20 nt, synthetic construct
  source 1..20: mol_type = other RNA
gcacccagtctctaacacag

SEQ ID NO: 30609 - RNA, 20 nt, synthetic construct
  source 1..20: mol_type = other RNA
gcaggcagggcagggtggag

SEQ ID NO: 30610 - RNA, 20 nt, synthetic construct
  source 1..20: mol_type = other RNA
gcaggcagtggcaggcaggg

SEQ ID NO: 30611 - RNA, 20 nt, synthetic construct
  source 1..20: mol_type = other RNA
gcagggcagggtggagcagt

SEQ ID NO: 30612 - RNA, 20 nt, synthetic construct
  source 1..20: mol_type = other RNA
gcagggtggagcagtcgctc

SEQ ID NO: 30613 - RNA, 20 nt, synthetic construct
  source 1..20: mol_type = other RNA
gcagtcgctcactggtccca

SEQ ID NO: 30614 - RNA, 20 nt, synthetic construct
  source 1..20: mol_type = other RNA
gcagtctcctagtgggacca

SEQ ID NO: 30615 - RNA, 20 nt, synthetic construct
  source 1..20: mol_type = other RNA
gcagtggcaggcagggcagg

SEQ ID NO: 30616 - RNA, 20 nt, synthetic construct
  source 1..20: mol_type = other RNA
gcatctggccggaggctggc

SEQ ID NO: 30617 - RNA, 20 nt, synthetic construct
  source 1..20: mol_type = other RNA
gccactgcctgcgctgttca

SEQ ID NO: 30618 - RNA, 20 nt, synthetic construct
  source 1..20: mol_type = other RNA
gccagatgcgcctggagaaa

SEQ ID NO: 30619 - RNA, 20 nt, synthetic construct
  source 1..20: mol_type = other RNA
gccagcctccggccagatgc

SEQ ID NO: 30620 - RNA, 20 nt, synthetic construct
  source 1..20: mol_type = other RNA
gccagtcaccacagtggggg

SEQ ID NO: 30621 - RNA, 20 nt, synthetic construct
  source 1..20: mol_type = other RNA
gcccactctctccaagcccc

SEQ ID NO: 30622 - RNA, 20 nt, synthetic construct
  source 1..20: mol_type = other RNA
gcccacttcctcacagctga

SEQ ID NO: 30623 - RNA, 20 nt, synthetic construct
  source 1..20: mol_type = other RNA
gccccccactgtggtgactg

SEQ ID NO: 30624 - RNA, 20 nt, synthetic construct
  source 1..20: mol_type = other RNA
gccccctaacatactgggaa

SEQ ID NO: 30625 - RNA, 20 nt, synthetic construct
  source 1..20: mol_type = other RNA
gcccctccaagcacccagtc

SEQ ID NO: 30626 - RNA, 20 nt, synthetic construct
  source 1..20: mol_type = other RNA
gccctgcctgccactgcctg

SEQ ID NO: 30627 - RNA, 20 nt, synthetic construct
  source 1..20: mol_type = other RNA
gccggaggctggctcctggt

SEQ ID NO: 30628 - RNA, 20 nt, synthetic construct
  source 1..20: mol_type = other RNA
gcctccggccagatgcgcct

SEQ ID NO: 30629 - RNA, 20 nt, synthetic construct
  source 1..20: mol_type = other RNA
gcctgccactgcctgcgctg

SEQ ID NO: 30630 - RNA, 20 nt, synthetic construct
  source 1..20: mol_type = other RNA
gcctgcgctgttcaaccagg

SEQ ID NO: 30631 - RNA, 20 nt, synthetic construct
  source 1..20: mol_type = other RNA
gcctggagaaaaccgaccag

SEQ ID NO: 30632 - RNA, 20 nt, synthetic construct
  source 1..20: mol_type = other RNA
gcgactgctccaccctgccc

SEQ ID NO: 30633 - RNA, 20 nt, synthetic construct
  source 1..20: mol_type = other RNA
gcgcaggcagtggcaggcag

SEQ ID NO: 30634 - RNA, 20 nt, synthetic construct
  source 1..20: mol_type = other RNA
gcgcatctggccggaggctg

SEQ ID NO: 30635 - RNA, 20 nt, synthetic construct
  source 1..20: mol_type = other RNA
gcgcctggagaaaaccgacc

SEQ ID NO: 30636 - RNA, 20 nt, synthetic construct
  source 1..20: mol_type = other RNA
gcgctgttcaaccaggagcc

SEQ ID NO: 30637 - RNA, 20 nt, synthetic construct
  source 1..20: mol_type = other RNA
gctcactggtcccactagga

SEQ ID NO: 30638 - RNA, 20 nt, synthetic construct
  source 1..20: mol_type = other RNA
gctcagctgtgaggaagtgg

SEQ ID NO: 30639 - RNA, 20 nt, synthetic construct
  source 1..20: mol_type = other RNA
gctccaccctgccctgcctg

SEQ ID NO: 30640 - RNA, 20 nt, synthetic construct
  source 1..20: mol_type = other RNA
gctcctggttgaacagcgca

SEQ ID NO: 30641 - RNA, 20 nt, synthetic construct
  source 1..20: mol_type = other RNA
gctgagccccccactgtggt

SEQ ID NO: 30642 - RNA, 20 nt, synthetic construct
  source 1..20: mol_type = other RNA
gctggctcctggttgaacag

SEQ ID NO: 30643 - RNA, 20 nt, synthetic construct
  source 1..20: mol_type = other RNA
gctgtgaggaagtgggctgt

SEQ ID NO: 30644 - RNA, 20 nt, synthetic construct
  source 1..20: mol_type = other RNA
gctgtgttagagactgggtg

SEQ ID NO: 30645 - RNA, 20 nt, synthetic construct
  source 1..20: mol_type = other RNA
gctgttcaaccaggagccag

SEQ ID NO: 30646 - RNA, 20 nt, synthetic construct
  source 1..20: mol_type = other RNA
gcttggagagagtgggcttt

SEQ ID NO: 30647 - RNA, 20 nt, synthetic construct
  source 1..20: mol_type = other RNA
ggaagtgggctgtgttagag

SEQ ID NO: 30648 - RNA, 20 nt, synthetic construct
  source 1..20: mol_type = other RNA
ggaatctggtcggttttctc

SEQ ID NO: 30649 - RNA, 20 nt, synthetic construct
  source 1..20: mol_type = other RNA
ggaccagtgagcgactgctc

SEQ ID NO: 30650 - RNA, 20 nt, synthetic construct
  source 1..20: mol_type = other RNA
ggagaaaaccgaccagattc

SEQ ID NO: 30651 - RNA, 20 nt, synthetic construct
  source 1..20: mol_type = other RNA
ggagaaagcccactctctcc

SEQ ID NO: 30652 - RNA, 20 nt, synthetic construct
  source 1..20: mol_type = other RNA
ggagactgccagtcaccaca

SEQ ID NO: 30653 - RNA, 20 nt, synthetic construct
  source 1..20: mol_type = other RNA
ggagagagtgggctttctcc

SEQ ID NO: 30654 - RNA, 20 nt, synthetic construct
  source 1..20: mol_type = other RNA
ggagcagtcgctcactggtc

SEQ ID NO: 30655 - RNA, 20 nt, synthetic construct
  source 1..20: mol_type = other RNA
ggagccagcctccggccaga

SEQ ID NO: 30656 - RNA, 20 nt, synthetic construct
  source 1..20: mol_type = other RNA
ggaggctggctcctggttga

SEQ ID NO: 30657 - RNA, 20 nt, synthetic construct
  source 1..20: mol_type = other RNA
ggcaggcagggcagggtgga

SEQ ID NO: 30658 - RNA, 20 nt, synthetic construct
  source 1..20: mol_type = other RNA
ggcagggcagggtggagcag

SEQ ID NO: 30659 - RNA, 20 nt, synthetic construct
  source 1..20: mol_type = other RNA
ggcagggtggagcagtcgct

SEQ ID NO: 30660 - RNA, 20 nt, synthetic construct
  source 1..20: mol_type = other RNA
ggcagtctcctagtgggacc

SEQ ID NO: 30661 - RNA, 20 nt, synthetic construct
  source 1..20: mol_type = other RNA
ggcagtggcaggcagggcag

SEQ ID NO: 30662 - RNA, 20 nt, synthetic construct
  source 1..20: mol_type = other RNA
ggccagatgcgcctggagaa

SEQ ID NO: 30663 - RNA, 20 nt, synthetic construct
  source 1..20: mol_type = other RNA
ggcccctccaagcacccagt

SEQ ID NO: 30664 - RNA, 20 nt, synthetic construct
  source 1..20: mol_type = other RNA
ggccggaggctggctcctgg

SEQ ID NO: 30665 - RNA, 20 nt, synthetic construct
  source 1..20: mol_type = other RNA
ggcgcatctggccggaggct

SEQ ID NO: 30666 - RNA, 20 nt, synthetic construct
  source 1..20: mol_type = other RNA
ggctcagctgtgaggaagtg

SEQ ID NO: 30667 - RNA, 20 nt, synthetic construct
  source 1..20: mol_type = other RNA
ggctcctggttgaacagcgc

SEQ ID NO: 30668 - RNA, 20 nt, synthetic construct
  source 1..20: mol_type = other RNA
ggctggctcctggttgaaca

SEQ ID NO: 30669 - RNA, 20 nt, synthetic construct
  source 1..20: mol_type = other RNA
ggctgtgttagagactgggt

SEQ ID NO: 30670 - RNA, 20 nt, synthetic construct
  source 1..20: mol_type = other RNA
ggcttggagagagtgggctt

SEQ ID NO: 30671 - RNA, 20 nt, synthetic construct
  source 1..20: mol_type = other RNA
gggaatctggtcggttttct

SEQ ID NO: 30672 - RNA, 20 nt, synthetic construct
  source 1..20: mol_type = other RNA
gggaccagtgagcgactgct

SEQ ID NO: 30673 - RNA, 20 nt, synthetic construct
  source 1..20: mol_type = other RNA
gggagaaagcccactctctc

SEQ ID NO: 30674 - RNA, 20 nt, synthetic construct
  source 1..20: mol_type = other RNA
gggcagggtggagcagtcgc

SEQ ID NO: 30675 - RNA, 20 nt, synthetic construct
  source 1..20: mol_type = other RNA
gggctcagctgtgaggaagt

SEQ ID NO: 30676 - RNA, 20 nt, synthetic construct
  source 1..20: mol_type = other RNA
gggctgtgttagagactggg

SEQ ID NO: 30677 - RNA, 20 nt, synthetic construct
  source 1..20: mol_type = other RNA
gggcttggagagagtgggct

SEQ ID NO: 30678 - RNA, 20 nt, synthetic construct
  source 1..20: mol_type = other RNA
ggggctcagctgtgaggaag

SEQ ID NO: 30679 - RNA, 20 nt, synthetic construct
  source 1..20: mol_type = other RNA
ggggcttggagagagtgggc

SEQ ID NO: 30680 - RNA, 20 nt, synthetic construct
  source 1..20: mol_type = other RNA
gggggctcagctgtgaggaa

SEQ ID NO: 30681 - RNA, 20 nt, synthetic construct
  source 1..20: mol_type = other RNA
gggggcttggagagagtggg

SEQ ID NO: 30682 - RNA, 20 nt, synthetic construct
  source 1..20: mol_type = other RNA
ggggggctcagctgtgagga

SEQ ID NO: 30683 - RNA, 20 nt, synthetic construct
  source 1..20: mol_type = other RNA
gggtggagcagtcgctcact

SEQ ID NO: 30684 - RNA, 20 nt, synthetic construct
  source 1..20: mol_type = other RNA
ggtcccactaggagactgcc

SEQ ID NO: 30685 - RNA, 20 nt, synthetic construct
  source 1..20: mol_type = other RNA
ggtcggttttctccaggcgc

SEQ ID NO: 30686 - RNA, 20 nt, synthetic construct
  source 1..20: mol_type = other RNA
ggtgactggcagtctcctag

SEQ ID NO: 30687 - RNA, 20 nt, synthetic construct
  source 1..20: mol_type = other RNA
ggtggagcagtcgctcactg

SEQ ID NO: 30688 - RNA, 20 nt, synthetic construct
  source 1..20: mol_type = other RNA
ggttgaacagcgcaggcagt

SEQ ID NO: 30689 - RNA, 20 nt, synthetic construct
  source 1..20: mol_type = other RNA
ggttttctccaggcgcatct

SEQ ID NO: 30690 - RNA, 20 nt, synthetic construct
  source 1..20: mol_type = other RNA
gtatgttagggggcttggag

SEQ ID NO: 30691 - RNA, 20 nt, synthetic construct
  source 1..20: mol_type = other RNA
gtcaccacagtggggggctc

SEQ ID NO: 30692 - RNA, 20 nt, synthetic construct
  source 1..20: mol_type = other RNA
gtcccactaggagactgcca

SEQ ID NO: 30693 - RNA, 20 nt, synthetic construct
  source 1..20: mol_type = other RNA
gtcgctcactggtcccacta

SEQ ID NO: 30694 - RNA, 20 nt, synthetic construct
  source 1..20: mol_type = other RNA
gtcggttttctccaggcgca

SEQ ID NO: 30695 - RNA, 20 nt, synthetic construct
  source 1..20: mol_type = other RNA
gtctcctagtgggaccagtg

SEQ ID NO: 30696 - RNA, 20 nt, synthetic construct
  source 1..20: mol_type = other RNA
gtctctaacacagcccactt

SEQ ID NO: 30697 - RNA, 20 nt, synthetic construct
  source 1..20: mol_type = other RNA
gtgactggcagtctcctagt

SEQ ID NO: 30698 - RNA, 20 nt, synthetic construct
  source 1..20: mol_type = other RNA
gtgagcgactgctccaccct

SEQ ID NO: 30699 - RNA, 20 nt, synthetic construct
  source 1..20: mol_type = other RNA
gtgaggaagtgggctgtgtt

SEQ ID NO: 30700 - RNA, 20 nt, synthetic construct
  source 1..20: mol_type = other RNA
gtggagcagtcgctcactgg

SEQ ID NO: 30701 - RNA, 20 nt, synthetic construct
  source 1..20: mol_type = other RNA
gtggcaggcagggcagggtg

SEQ ID NO: 30702 - RNA, 20 nt, synthetic construct
  source 1..20: mol_type = other RNA
gtgggaccagtgagcgactg

SEQ ID NO: 30703 - RNA, 20 nt, synthetic construct
  source 1..20: mol_type = other RNA
gtgggctgtgttagagactg

SEQ ID NO: 30704 - RNA, 20 nt, synthetic construct
  source 1..20: mol_type = other RNA
gtggggggctcagctgtgag

SEQ ID NO: 30705 - RNA, 20 nt, synthetic construct
  source 1..20: mol_type = other RNA
gtggtgactggcagtctcct

SEQ ID NO: 30706 - RNA, 20 nt, synthetic construct
  source 1..20: mol_type = other RNA
gtgttagagactgggtgctt

SEQ ID NO: 30707 - RNA, 20 nt, synthetic construct
  source 1..20: mol_type = other RNA
gttagggggcttggagagag

SEQ ID NO: 30708 - RNA, 20 nt, synthetic construct
  source 1..20: mol_type = other RNA
gttcaaccaggagccagcct

SEQ ID NO: 30709 - RNA, 20 nt, synthetic construct
  source 1..20: mol_type = other RNA
gttgaacagcgcaggcagtg

SEQ ID NO: 30710 - RNA, 20 nt, synthetic construct
  source 1..20: mol_type = other RNA
gttttctccaggcgcatctg

SEQ ID NO: 30711 - RNA, 20 nt, synthetic construct
  source 1..20: mol_type = other RNA
taacacagcccacttcctca

SEQ ID NO: 30712 - RNA, 20 nt, synthetic construct
  source 1..20: mol_type = other RNA
taacatactgggaatctggt

SEQ ID NO: 30713 - RNA, 20 nt, synthetic construct
  source 1..20: mol_type = other RNA
tactgggaatctggtcggtt

SEQ ID NO: 30714 - RNA, 20 nt, synthetic construct
  source 1..20: mol_type = other RNA
taggagactgccagtcacca

SEQ ID NO: 30715 - RNA, 20 nt, synthetic construct
  source 1..20: mol_type = other RNA
tagggggcttggagagagtg

SEQ ID NO: 30716 - RNA, 20 nt, synthetic construct
  source 1..20: mol_type = other RNA
tagtgggaccagtgagcgac

SEQ ID NO: 30717 - RNA, 20 nt, synthetic construct
  source 1..20: mol_type = other RNA
tatgttagggggcttggaga

SEQ ID NO: 30718 - RNA, 20 nt, synthetic construct
  source 1..20: mol_type = other RNA
tcaaccaggagccagcctcc

SEQ ID NO: 30719 - RNA, 20 nt, synthetic construct
  source 1..20: mol_type = other RNA
tcacagctgagccccccact

SEQ ID NO: 30720 - RNA, 20 nt, synthetic construct
  source 1..20: mol_type = other RNA
tcaccacagtggggggctca

SEQ ID NO: 30721 - RNA, 20 nt, synthetic construct
  source 1..20: mol_type = other RNA
tcactggtcccactaggaga

SEQ ID NO: 30722 - RNA, 20 nt, synthetic construct
  source 1..20: mol_type = other RNA
tcagctgtgaggaagtgggc

SEQ ID NO: 30723 - RNA, 20 nt, synthetic construct
  source 1..20: mol_type = other RNA
tccaagcacccagtctctaa

SEQ ID NO: 30724 - RNA, 20 nt, synthetic construct
  source 1..20: mol_type = other RNA
tccaagccccctaacatact

SEQ ID NO: 30725 - RNA, 20 nt, synthetic construct
  source 1..20: mol_type = other RNA
tccaccctgccctgcctgcc

SEQ ID NO: 30726 - RNA, 20 nt, synthetic construct
  source 1..20: mol_type = other RNA
tccaggcgcatctggccgga

SEQ ID NO: 30727 - RNA, 20 nt, synthetic construct
  source 1..20: mol_type = other RNA
tcccaagagggagaaagccc

SEQ ID NO: 30728 - RNA, 20 nt, synthetic construct
  source 1..20: mol_type = other RNA
tcccactaggagactgccag

SEQ ID NO: 30729 - RNA, 20 nt, synthetic construct
  source 1..20: mol_type = other RNA
tcccagtatgttagggggct

SEQ ID NO: 30730 - RNA, 20 nt, synthetic construct
  source 1..20: mol_type = other RNA
tccggccagatgcgcctgga

SEQ ID NO: 30731 - RNA, 20 nt, synthetic construct
  source 1..20: mol_type = other RNA
tcctagtgggaccagtgagc

SEQ ID NO: 30732 - RNA, 20 nt, synthetic construct
  source 1..20: mol_type = other RNA
tcctcacagctgagcccccc

SEQ ID NO: 30733 - RNA, 20 nt, synthetic construct
  source 1..20: mol_type = other RNA
tcctggttgaacagcgcagg

SEQ ID NO: 30734 - RNA, 20 nt, synthetic construct
  source 1..20: mol_type = other RNA
tcgctcactggtcccactag

SEQ ID NO: 30735 - RNA, 20 nt, synthetic construct
  source 1..20: mol_type = other RNA
tcggttttctccaggcgcat

SEQ ID NO: 30736 - RNA, 20 nt, synthetic construct
  source 1..20: mol_type = other RNA
tctaacacagcccacttcct

SEQ ID NO: 30737 - RNA, 20 nt, synthetic construct
  source 1..20: mol_type = other RNA
tctccaagccccctaacata

SEQ ID NO: 30738 - RNA, 20 nt, synthetic construct
  source 1..20: mol_type = other RNA
tctccaggcgcatctggccg

SEQ ID NO: 30739 - RNA, 20 nt, synthetic construct
  source 1..20: mol_type = other RNA
tctcctagtgggaccagtga

SEQ ID NO: 30740 - RNA, 20 nt, synthetic construct
  source 1..20: mol_type = other RNA
tctctaacacagcccacttc

SEQ ID NO: 30741 - RNA, 20 nt, synthetic construct
  source 1..20: mol_type = other RNA
tctctccaagccccctaaca

SEQ ID NO: 30742 - RNA, 20 nt, synthetic construct
  source 1..20: mol_type = other RNA
tctggccggaggctggctcc

SEQ ID NO: 30743 - RNA, 20 nt, synthetic construct
  source 1..20: mol_type = other RNA
tctggtcggttttctccagg

SEQ ID NO: 30744 - RNA, 20 nt, synthetic construct
  source 1..20: mol_type = other RNA
tgaacagcgcaggcagtggc

SEQ ID NO: 30745 - RNA, 20 nt, synthetic construct
  source 1..20: mol_type = other RNA
tgactggcagtctcctagtg

SEQ ID NO: 30746 - RNA, 20 nt, synthetic construct
  source 1..20: mol_type = other RNA
tgagccccccactgtggtga

SEQ ID NO: 30747 - RNA, 20 nt, synthetic construct
  source 1..20: mol_type = other RNA
tgagcgactgctccaccctg

SEQ ID NO: 30748 - RNA, 20 nt, synthetic construct
  source 1..20: mol_type = other RNA
tgaggaagtgggctgtgtta

SEQ ID NO: 30749 - RNA, 20 nt, synthetic construct
  source 1..20: mol_type = other RNA
tgccactgcctgcgctgttc

SEQ ID NO: 30750 - RNA, 20 nt, synthetic construct
  source 1..20: mol_type = other RNA
tgccagtcaccacagtgggg

SEQ ID NO: 30751 - RNA, 20 nt, synthetic construct
  source 1..20: mol_type = other RNA
tgccctgcctgccactgcct

SEQ ID NO: 30752 - RNA, 20 nt, synthetic construct
  source 1..20: mol_type = other RNA
tgcctgccactgcctgcgct

SEQ ID NO: 30753 - RNA, 20 nt, synthetic construct
  source 1..20: mol_type = other RNA
tgcctgcgctgttcaaccag

SEQ ID NO: 30754 - RNA, 20 nt, synthetic construct
  source 1..20: mol_type = other RNA
tgcgcctggagaaaaccgac

SEQ ID NO: 30755 - RNA, 20 nt, synthetic construct
  source 1..20: mol_type = other RNA
tgcgctgttcaaccaggagc

SEQ ID NO: 30756 - RNA, 20 nt, synthetic construct
  source 1..20: mol_type = other RNA
tgctccaccctgccctgcct

SEQ ID NO: 30757 - RNA, 20 nt, synthetic construct
  source 1..20: mol_type = other RNA
tggagaaaaccgaccagatt

SEQ ID NO: 30758 - RNA, 20 nt, synthetic construct
  source 1..20: mol_type = other RNA
tggagagagtgggctttctc

SEQ ID NO: 30759 - RNA, 20 nt, synthetic construct
  source 1..20: mol_type = other RNA
tggagcagtcgctcactggt

SEQ ID NO: 30760 - RNA, 20 nt, synthetic construct
  source 1..20: mol_type = other RNA
tggcaggcagggcagggtgg

SEQ ID NO: 30761 - RNA, 20 nt, synthetic construct
  source 1..20: mol_type = other RNA
tggcagtctcctagtgggac

SEQ ID NO: 30762 - RNA, 20 nt, synthetic construct
  source 1..20: mol_type = other RNA
tggccggaggctggctcctg

SEQ ID NO: 30763 - RNA, 20 nt, synthetic construct
  source 1..20: mol_type = other RNA
tggctcctggttgaacagcg

SEQ ID NO: 30764 - RNA, 20 nt, synthetic construct
  source 1..20: mol_type = other RNA
tgggaatctggtcggttttc

SEQ ID NO: 30765 - RNA, 20 nt, synthetic construct
  source 1..20: mol_type = other RNA
tgggaccagtgagcgactgc

SEQ ID NO: 30766 - RNA, 20 nt, synthetic construct
  source 1..20: mol_type = other RNA
tgggctgtgttagagactgg

SEQ ID NO: 30767 - RNA, 20 nt, synthetic construct
  source 1..20: mol_type = other RNA
tggggggctcagctgtgagg

SEQ ID NO: 30768 - RNA, 20 nt, synthetic construct
  source 1..20: mol_type = other RNA
tggtcccactaggagactgc

SEQ ID NO: 30769 - RNA, 20 nt, synthetic construct
  source 1..20: mol_type = other RNA
tggtcggttttctccaggcg

SEQ ID NO: 30770 - RNA, 20 nt, synthetic construct
  source 1..20: mol_type = other RNA
tggtgactggcagtctccta

SEQ ID NO: 30771 - RNA, 20 nt, synthetic construct
  source 1..20: mol_type = other RNA
tggttgaacagcgcaggcag

SEQ ID NO: 30772 - RNA, 20 nt, synthetic construct
  source 1..20: mol_type = other RNA
tgtgaggaagtgggctgtgt

SEQ ID NO: 30773 - RNA, 20 nt, synthetic construct
  source 1..20: mol_type = other RNA
tgtggtgactggcagtctcc

SEQ ID NO: 30774 - RNA, 20 nt, synthetic construct
  source 1..20: mol_type = other RNA
tgtgttagagactgggtgct

SEQ ID NO: 30775 - RNA, 20 nt, synthetic construct
  source 1..20: mol_type = other RNA
tgttagagactgggtgcttg

SEQ ID NO: 30776 - RNA, 20 nt, synthetic construct
  source 1..20: mol_type = other RNA
tgttagggggcttggagaga

SEQ ID NO: 30777 - RNA, 20 nt, synthetic construct
  source 1..20: mol_type = other RNA
tgttcaaccaggagccagcc

SEQ ID NO: 30778 - RNA, 20 nt, synthetic construct
  source 1..20: mol_type = other RNA
ttagggggcttggagagagt

SEQ ID NO: 30779 - RNA, 20 nt, synthetic construct
  source 1..20: mol_type = other RNA
ttcaaccaggagccagcctc

SEQ ID NO: 30780 - RNA, 20 nt, synthetic construct
  source 1..20: mol_type = other RNA
ttcccagtatgttagggggc

SEQ ID NO: 30781 - RNA, 20 nt, synthetic construct
  source 1..20: mol_type = other RNA
ttcctcacagctgagccccc

SEQ ID NO: 30782 - RNA, 20 nt, synthetic construct
  source 1..20: mol_type = other RNA
ttctccaggcgcatctggcc

SEQ ID NO: 30783 - RNA, 20 nt, synthetic construct
  source 1..20: mol_type = other RNA
ttgaacagcgcaggcagtgg

SEQ ID NO: 30784 - RNA, 20 nt, synthetic construct
  source 1..20: mol_type = other RNA
ttggagagagtgggctttct

SEQ ID NO: 30785 - RNA, 20 nt, synthetic construct
  source 1..20: mol_type = other RNA
tttctccaggcgcatctggc

SEQ ID NO: 30786 - RNA, 20 nt, synthetic construct
  source 1..20: mol_type = other RNA
ttttctccaggcgcatctgg

SEQ ID NO: 30787 - RNA, 21 nt, synthetic construct
  source 1..21: mol_type = other RNA
aaaaccgaccagattcccagt

SEQ ID NO: 30788 - RNA, 21 nt, synthetic construct
  source 1..21: mol_type = other RNA
aaaccgaccagattcccagta

SEQ ID NO: 30789 - RNA, 21 nt, synthetic construct
  source 1..21: mol_type = other RNA
aaagcccactctctccaagcc

SEQ ID NO: 30790 - RNA, 21 nt, synthetic construct
  source 1..21: mol_type = other RNA
aacacagcccacttcctcaca

SEQ ID NO: 30791 - RNA, 21 nt, synthetic construct
  source 1..21: mol_type = other RNA
aacagcgcaggcagtggcagg

SEQ ID NO: 30792 - RNA, 21 nt, synthetic construct
  source 1..21: mol_type = other RNA
aacatactgggaatctggtcg

SEQ ID NO: 30793 - RNA, 21 nt, synthetic construct
  source 1..21: mol_type = other RNA
aaccaggagccagcctccggc

SEQ ID NO: 30794 - RNA, 21 nt, synthetic construct
  source 1..21: mol_type = other RNA
aaccgaccagattcccagtat

SEQ ID NO: 30795 - RNA, 21 nt, synthetic construct
  source 1..21: mol_type = other RNA
aagagggagaaagcccactct

SEQ ID NO: 30796 - RNA, 21 nt, synthetic construct
  source 1..21: mol_type = other RNA
aagcacccagtctctaacaca

SEQ ID NO: 30797 - RNA, 21 nt, synthetic construct
  source 1..21: mol_type = other RNA
aagcccactctctccaagccc

SEQ ID NO: 30798 - RNA, 21 nt, synthetic construct
  source 1..21: mol_type = other RNA
aagccccctaacatactggga

SEQ ID NO: 30799 - RNA, 21 nt, synthetic construct
  source 1..21: mol_type = other RNA
aagtgggctgtgttagagact

SEQ ID NO: 30800 - RNA, 21 nt, synthetic construct
  source 1..21: mol_type = other RNA
aatctggtcggttttctccag

SEQ ID NO: 30801 - RNA, 21 nt, synthetic construct
  source 1..21: mol_type = other RNA
acacagcccacttcctcacag

SEQ ID NO: 30802 - RNA, 21 nt, synthetic construct
  source 1..21: mol_type = other RNA
acagcccacttcctcacagct

SEQ ID NO: 30803 - RNA, 21 nt, synthetic construct
  source 1..21: mol_type = other RNA
acagcgcaggcagtggcaggc

SEQ ID NO: 30804 - RNA, 21 nt, synthetic construct
  source 1..21: mol_type = other RNA
acagctgagccccccactgtg

SEQ ID NO: 30805 - RNA, 21 nt, synthetic construct
  source 1..21: mol_type = other RNA
acagtggggggctcagctgtg

SEQ ID NO: 30806 - RNA, 21 nt, synthetic construct
  source 1..21: mol_type = other RNA
acatactgggaatctggtcgg

SEQ ID NO: 30807 - RNA, 21 nt, synthetic construct
  source 1..21: mol_type = other RNA
accacagtggggggctcagct

SEQ ID NO: 30808 - RNA, 21 nt, synthetic construct
  source 1..21: mol_type = other RNA
accagattcccagtatgttag

SEQ ID NO: 30809 - RNA, 21 nt, synthetic construct
  source 1..21: mol_type = other RNA
accaggagccagcctccggcc

SEQ ID NO: 30810 - RNA, 21 nt, synthetic construct
  source 1..21: mol_type = other RNA
accagtgagcgactgctccac

SEQ ID NO: 30811 - RNA, 21 nt, synthetic construct
  source 1..21: mol_type = other RNA
acccagtctctaacacagccc

SEQ ID NO: 30812 - RNA, 21 nt, synthetic construct
  source 1..21: mol_type = other RNA
accctgccctgcctgccactg

SEQ ID NO: 30813 - RNA, 21 nt, synthetic construct
  source 1..21: mol_type = other RNA
accgaccagattcccagtatg

SEQ ID NO: 30814 - RNA, 21 nt, synthetic construct
  source 1..21: mol_type = other RNA
actaggagactgccagtcacc

SEQ ID NO: 30815 - RNA, 21 nt, synthetic construct
  source 1..21: mol_type = other RNA
actctctccaagccccctaac

SEQ ID NO: 30816 - RNA, 21 nt, synthetic construct
  source 1..21: mol_type = other RNA
actgccagtcaccacagtggg

SEQ ID NO: 30817 - RNA, 21 nt, synthetic construct
  source 1..21: mol_type = other RNA
actgcctgcgctgttcaacca

SEQ ID NO: 30818 - RNA, 21 nt, synthetic construct
  source 1..21: mol_type = other RNA
actgctccaccctgccctgcc

SEQ ID NO: 30819 - RNA, 21 nt, synthetic construct
  source 1..21: mol_type = other RNA
actggcagtctcctagtggga

SEQ ID NO: 30820 - RNA, 21 nt, synthetic construct
  source 1..21: mol_type = other RNA
actgggaatctggtcggtttt

SEQ ID NO: 30821 - RNA, 21 nt, synthetic construct
  source 1..21: mol_type = other RNA
actggtcccactaggagactg

SEQ ID NO: 30822 - RNA, 21 nt, synthetic construct
  source 1..21: mol_type = other RNA
actgtggtgactggcagtctc

SEQ ID NO: 30823 - RNA, 21 nt, synthetic construct
  source 1..21: mol_type = other RNA
acttcctcacagctgagcccc

SEQ ID NO: 30824 - RNA, 21 nt, synthetic construct
  source 1..21: mol_type = other RNA
agaaaaccgaccagattccca

SEQ ID NO: 30825 - RNA, 21 nt, synthetic construct
  source 1..21: mol_type = other RNA
agaaagcccactctctccaag

SEQ ID NO: 30826 - RNA, 21 nt, synthetic construct
  source 1..21: mol_type = other RNA
agactgccagtcaccacagtg

SEQ ID NO: 30827 - RNA, 21 nt, synthetic construct
  source 1..21: mol_type = other RNA
agagggagaaagcccactctc

SEQ ID NO: 30828 - RNA, 21 nt, synthetic construct
  source 1..21: mol_type = other RNA
agatgcgcctggagaaaaccg

SEQ ID NO: 30829 - RNA, 21 nt, synthetic construct
  source 1..21: mol_type = other RNA
agattcccagtatgttagggg

SEQ ID NO: 30830 - RNA, 21 nt, synthetic construct
  source 1..21: mol_type = other RNA
agcacccagtctctaacacag

SEQ ID NO: 30831 - RNA, 21 nt, synthetic construct
  source 1..21: mol_type = other RNA
agcagtcgctcactggtccca

SEQ ID NO: 30832 - RNA, 21 nt, synthetic construct
  source 1..21: mol_type = other RNA
agccagcctccggccagatgc

SEQ ID NO: 30833 - RNA, 21 nt, synthetic construct
  source 1..21: mol_type = other RNA
agcccactctctccaagcccc

SEQ ID NO: 30834 - RNA, 21 nt, synthetic construct
  source 1..21: mol_type = other RNA
agcccacttcctcacagctga

SEQ ID NO: 30835 - RNA, 21 nt, synthetic construct
  source 1..21: mol_type = other RNA
agccccccactgtggtgactg

SEQ ID NO: 30836 - RNA, 21 nt, synthetic construct
  source 1..21: mol_type = other RNA
agccccctaacatactgggaa

SEQ ID NO: 30837 - RNA, 21 nt, synthetic construct
  source 1..21: mol_type = other RNA
agcctccggccagatgcgcct

SEQ ID NO: 30838 - RNA, 21 nt, synthetic construct
  source 1..21: mol_type = other RNA
agcgactgctccaccctgccc

SEQ ID NO: 30839 - RNA, 21 nt, synthetic construct
  source 1..21: mol_type = other RNA
agcgcaggcagtggcaggcag

SEQ ID NO: 30840 - RNA, 21 nt, synthetic construct
  source 1..21: mol_type = other RNA
agctgagccccccactgtggt

SEQ ID NO: 30841 - RNA, 21 nt, synthetic construct
  source 1..21: mol_type = other RNA
agctgtgaggaagtgggctgt

SEQ ID NO: 30842 - RNA, 21 nt, synthetic construct
  source 1..21: mol_type = other RNA
aggaagtgggctgtgttagag

SEQ ID NO: 30843 - RNA, 21 nt, synthetic construct
  source 1..21: mol_type = other RNA
aggagactgccagtcaccaca

SEQ ID NO: 30844 - RNA, 21 nt, synthetic construct
  source 1..21: mol_type = other RNA
aggagccagcctccggccaga

SEQ ID NO: 30845 - RNA, 21 nt, synthetic construct
  source 1..21: mol_type = other RNA
aggcagggcagggtggagcag

SEQ ID NO: 30846 - RNA, 21 nt, synthetic construct
  source 1..21: mol_type = other RNA
aggcagtggcaggcagggcag

SEQ ID NO: 30847 - RNA, 21 nt, synthetic construct
  source 1..21: mol_type = other RNA
aggcgcatctggccggaggct

SEQ ID NO: 30848 - RNA, 21 nt, synthetic construct
  source 1..21: mol_type = other RNA
aggctggctcctggttgaaca

SEQ ID NO: 30849 - RNA, 21 nt, synthetic construct
  source 1..21: mol_type = other RNA
agggagaaagcccactctctc

SEQ ID NO: 30850 - RNA, 21 nt, synthetic construct
  source 1..21: mol_type = other RNA
agggcagggtggagcagtcgc

SEQ ID NO: 30851 - RNA, 21 nt, synthetic construct
  source 1..21: mol_type = other RNA
agggggcttggagagagtggg

SEQ ID NO: 30852 - RNA, 21 nt, synthetic construct
  source 1..21: mol_type = other RNA
agggtggagcagtcgctcact

SEQ ID NO: 30853 - RNA, 21 nt, synthetic construct
  source 1..21: mol_type = other RNA
agtatgttagggggcttggag

SEQ ID NO: 30854 - RNA, 21 nt, synthetic construct
  source 1..21: mol_type = other RNA
agtcaccacagtggggggctc

SEQ ID NO: 30855 - RNA, 21 nt, synthetic construct
  source 1..21: mol_type = other RNA
agtcgctcactggtcccacta

SEQ ID NO: 30856 - RNA, 21 nt, synthetic construct
  source 1..21: mol_type = other RNA
agtctcctagtgggaccagtg

SEQ ID NO: 30857 - RNA, 21 nt, synthetic construct
  source 1..21: mol_type = other RNA
agtctctaacacagcccactt

SEQ ID NO: 30858 - RNA, 21 nt, synthetic construct
  source 1..21: mol_type = other RNA
agtgagcgactgctccaccct

SEQ ID NO: 30859 - RNA, 21 nt, synthetic construct
  source 1..21: mol_type = other RNA
agtggcaggcagggcagggtg

SEQ ID NO: 30860 - RNA, 21 nt, synthetic construct
  source 1..21: mol_type = other RNA
agtgggaccagtgagcgactg

SEQ ID NO: 30861 - RNA, 21 nt, synthetic construct
  source 1..21: mol_type = other RNA
agtgggctgtgttagagactg

SEQ ID NO: 30862 - RNA, 21 nt, synthetic construct
  source 1..21: mol_type = other RNA
agtggggggctcagctgtgag

SEQ ID NO: 30863 - RNA, 21 nt, synthetic construct
  source 1..21: mol_type = other RNA
atactgggaatctggtcggtt

SEQ ID NO: 30864 - RNA, 21 nt, synthetic construct
  source 1..21: mol_type = other RNA
atctggccggaggctggctcc

SEQ ID NO: 30865 - RNA, 21 nt, synthetic construct
  source 1..21: mol_type = other RNA
atctggtcggttttctccagg

SEQ ID NO: 30866 - RNA, 21 nt, synthetic construct
  source 1..21: mol_type = other RNA
atgcgcctggagaaaaccgac

SEQ ID NO: 30867 - RNA, 21 nt, synthetic construct
  source 1..21: mol_type = other RNA
atgttagggggcttggagaga

SEQ ID NO: 30868 - RNA, 21 nt, synthetic construct
  source 1..21: mol_type = other RNA
attcccagtatgttagggggc

SEQ ID NO: 30869 - RNA, 21 nt, synthetic construct
  source 1..21: mol_type = other RNA
caaccaggagccagcctccgg

SEQ ID NO: 30870 - RNA, 21 nt, synthetic construct
  source 1..21: mol_type = other RNA
caagagggagaaagcccactc

SEQ ID NO: 30871 - RNA, 21 nt, synthetic construct
  source 1..21: mol_type = other RNA
caagcacccagtctctaacac

SEQ ID NO: 30872 - RNA, 21 nt, synthetic construct
  source 1..21: mol_type = other RNA
caagccccctaacatactggg

SEQ ID NO: 30873 - RNA, 21 nt, synthetic construct
  source 1..21: mol_type = other RNA
cacagcccacttcctcacagc

SEQ ID NO: 30874 - RNA, 21 nt, synthetic construct
  source 1..21: mol_type = other RNA
cacagctgagccccccactgt

SEQ ID NO: 30875 - RNA, 21 nt, synthetic construct
  source 1..21: mol_type = other RNA
cacagtggggggctcagctgt

SEQ ID NO: 30876 - RNA, 21 nt, synthetic construct
  source 1..21: mol_type = other RNA
caccacagtggggggctcagc

SEQ ID NO: 30877 - RNA, 21 nt, synthetic construct
  source 1..21: mol_type = other RNA
cacccagtctctaacacagcc

SEQ ID NO: 30878 - RNA, 21 nt, synthetic construct
  source 1..21: mol_type = other RNA
caccctgccctgcctgccact

SEQ ID NO: 30879 - RNA, 21 nt, synthetic construct
  source 1..21: mol_type = other RNA
cactaggagactgccagtcac

SEQ ID NO: 30880 - RNA, 21 nt, synthetic construct
  source 1..21: mol_type = other RNA
cactctctccaagccccctaa

SEQ ID NO: 30881 - RNA, 21 nt, synthetic construct
  source 1..21: mol_type = other RNA
cactgcctgcgctgttcaacc

SEQ ID NO: 30882 - RNA, 21 nt, synthetic construct
  source 1..21: mol_type = other RNA
cactggtcccactaggagact

SEQ ID NO: 30883 - RNA, 21 nt, synthetic construct
  source 1..21: mol_type = other RNA
cactgtggtgactggcagtct

SEQ ID NO: 30884 - RNA, 21 nt, synthetic construct
  source 1..21: mol_type = other RNA
cacttcctcacagctgagccc

SEQ ID NO: 30885 - RNA, 21 nt, synthetic construct
  source 1..21: mol_type = other RNA
cagatgcgcctggagaaaacc

SEQ ID NO: 30886 - RNA, 21 nt, synthetic construct
  source 1..21: mol_type = other RNA
cagattcccagtatgttaggg

SEQ ID NO: 30887 - RNA, 21 nt, synthetic construct
  source 1..21: mol_type = other RNA
cagcccacttcctcacagctg

SEQ ID NO: 30888 - RNA, 21 nt, synthetic construct
  source 1..21: mol_type = other RNA
cagcctccggccagatgcgcc

SEQ ID NO: 30889 - RNA, 21 nt, synthetic construct
  source 1..21: mol_type = other RNA
cagcgcaggcagtggcaggca

SEQ ID NO: 30890 - RNA, 21 nt, synthetic construct
  source 1..21: mol_type = other RNA
cagctgagccccccactgtgg

SEQ ID NO: 30891 - RNA, 21 nt, synthetic construct
  source 1..21: mol_type = other RNA
cagctgtgaggaagtgggctg

SEQ ID NO: 30892 - RNA, 21 nt, synthetic construct
  source 1..21: mol_type = other RNA
caggagccagcctccggccag

SEQ ID NO: 30893 - RNA, 21 nt, synthetic construct
  source 1..21: mol_type = other RNA
caggcagggcagggtggagca

SEQ ID NO: 30894 - RNA, 21 nt, synthetic construct
  source 1..21: mol_type = other RNA
caggcagtggcaggcagggca

SEQ ID NO: 30895 - RNA, 21 nt, synthetic construct
  source 1..21: mol_type = other RNA
caggcgcatctggccggaggc

SEQ ID NO: 30896 - RNA, 21 nt, synthetic construct
  source 1..21: mol_type = other RNA
cagggcagggtggagcagtcg

SEQ ID NO: 30897 - RNA, 21 nt, synthetic construct
  source 1..21: mol_type = other RNA
cagggtggagcagtcgctcac

SEQ ID NO: 30898 - RNA, 21 nt, synthetic construct
  source 1..21: mol_type = other RNA
cagtatgttagggggcttgga

SEQ ID NO: 30899 - RNA, 21 nt, synthetic construct
  source 1..21: mol_type = other RNA
cagtcaccacagtggggggct

SEQ ID NO: 30900 - RNA, 21 nt, synthetic construct
  source 1..21: mol_type = other RNA
cagtcgctcactggtcccact

SEQ ID NO: 30901 - RNA, 21 nt, synthetic construct
  source 1..21: mol_type = other RNA
cagtctcctagtgggaccagt

SEQ ID NO: 30902 - RNA, 21 nt, synthetic construct
  source 1..21: mol_type = other RNA
cagtctctaacacagcccact

SEQ ID NO: 30903 - RNA, 21 nt, synthetic construct
  source 1..21: mol_type = other RNA
cagtgagcgactgctccaccc

SEQ ID NO: 30904 - RNA, 21 nt, synthetic construct
  source 1..21: mol_type = other RNA
cagtggcaggcagggcagggt

SEQ ID NO: 30905 - RNA, 21 nt, synthetic construct
  source 1..21: mol_type = other RNA
cagtggggggctcagctgtga

SEQ ID NO: 30906 - RNA, 21 nt, synthetic construct
  source 1..21: mol_type = other RNA
catactgggaatctggtcggt

SEQ ID NO: 30907 - RNA, 21 nt, synthetic construct
  source 1..21: mol_type = other RNA
catctggccggaggctggctc

SEQ ID NO: 30908 - RNA, 21 nt, synthetic construct
  source 1..21: mol_type = other RNA
ccaagagggagaaagcccact

SEQ ID NO: 30909 - RNA, 21 nt, synthetic construct
  source 1..21: mol_type = other RNA
ccaagcacccagtctctaaca

SEQ ID NO: 30910 - RNA, 21 nt, synthetic construct
  source 1..21: mol_type = other RNA
ccaagccccctaacatactgg

SEQ ID NO: 30911 - RNA, 21 nt, synthetic construct
  source 1..21: mol_type = other RNA
ccacagtggggggctcagctg

SEQ ID NO: 30912 - RNA, 21 nt, synthetic construct
  source 1..21: mol_type = other RNA
ccaccctgccctgcctgccac

SEQ ID NO: 30913 - RNA, 21 nt, synthetic construct
  source 1..21: mol_type = other RNA
ccactaggagactgccagtca

SEQ ID NO: 30914 - RNA, 21 nt, synthetic construct
  source 1..21: mol_type = other RNA
ccactctctccaagcccccta

SEQ ID NO: 30915 - RNA, 21 nt, synthetic construct
  source 1..21: mol_type = other RNA
ccactgcctgcgctgttcaac

SEQ ID NO: 30916 - RNA, 21 nt, synthetic construct
  source 1..21: mol_type = other RNA
ccactgtggtgactggcagtc

SEQ ID NO: 30917 - RNA, 21 nt, synthetic construct
  source 1..21: mol_type = other RNA
ccacttcctcacagctgagcc

SEQ ID NO: 30918 - RNA, 21 nt, synthetic construct
  source 1..21: mol_type = other RNA
ccagatgcgcctggagaaaac

SEQ ID NO: 30919 - RNA, 21 nt, synthetic construct
  source 1..21: mol_type = other RNA
ccagattcccagtatgttagg

SEQ ID NO: 30920 - RNA, 21 nt, synthetic construct
  source 1..21: mol_type = other RNA
ccagcctccggccagatgcgc

SEQ ID NO: 30921 - RNA, 21 nt, synthetic construct
  source 1..21: mol_type = other RNA
ccaggagccagcctccggcca

SEQ ID NO: 30922 - RNA, 21 nt, synthetic construct
  source 1..21: mol_type = other RNA
ccaggcgcatctggccggagg

SEQ ID NO: 30923 - RNA, 21 nt, synthetic construct
  source 1..21: mol_type = other RNA
ccagtatgttagggggcttgg

SEQ ID NO: 30924 - RNA, 21 nt, synthetic construct
  source 1..21: mol_type = other RNA
ccagtcaccacagtggggggc

SEQ ID NO: 30925 - RNA, 21 nt, synthetic construct
  source 1..21: mol_type = other RNA
ccagtctctaacacagcccac

SEQ ID NO: 30926 - RNA, 21 nt, synthetic construct
  source 1..21: mol_type = other RNA
ccagtgagcgactgctccacc

SEQ ID NO: 30927 - RNA, 21 nt, synthetic construct
  source 1..21: mol_type = other RNA
cccaagagggagaaagcccac

SEQ ID NO: 30928 - RNA, 21 nt, synthetic construct
  source 1..21: mol_type = other RNA
cccactaggagactgccagtc

SEQ ID NO: 30929 - RNA, 21 nt, synthetic construct
  source 1..21: mol_type = other RNA
cccactctctccaagccccct

SEQ ID NO: 30930 - RNA, 21 nt, synthetic construct
  source 1..21: mol_type = other RNA
cccactgtggtgactggcagt

SEQ ID NO: 30931 - RNA, 21 nt, synthetic construct
  source 1..21: mol_type = other RNA
cccacttcctcacagctgagc

SEQ ID NO: 30932 - RNA, 21 nt, synthetic construct
  source 1..21: mol_type = other RNA
cccagtatgttagggggcttg

SEQ ID NO: 30933 - RNA, 21 nt, synthetic construct
  source 1..21: mol_type = other RNA
cccagtctctaacacagccca

SEQ ID NO: 30934 - RNA, 21 nt, synthetic construct
  source 1..21: mol_type = other RNA
ccccactgtggtgactggcag

SEQ ID NO: 30935 - RNA, 21 nt, synthetic construct
  source 1..21: mol_type = other RNA
cccccactgtggtgactggca

SEQ ID NO: 30936 - RNA, 21 nt, synthetic construct
  source 1..21: mol_type = other RNA
ccccccactgtggtgactggc

SEQ ID NO: 30937 - RNA, 21 nt, synthetic construct
  source 1..21: mol_type = other RNA
ccccctaacatactgggaatc

SEQ ID NO: 30938 - RNA, 21 nt, synthetic construct
  source 1..21: mol_type = other RNA
cccctaacatactgggaatct

SEQ ID NO: 30939 - RNA, 21 nt, synthetic construct
  source 1..21: mol_type = other RNA
cccctccaagcacccagtctc

SEQ ID NO: 30940 - RNA, 21 nt, synthetic construct
  source 1..21: mol_type = other RNA
ccctaacatactgggaatctg

SEQ ID NO: 30941 - RNA, 21 nt, synthetic construct
  source 1..21: mol_type = other RNA
ccctccaagcacccagtctct

SEQ ID NO: 30942 - RNA, 21 nt, synthetic construct
  source 1..21: mol_type = other RNA
ccctgccctgcctgccactgc

SEQ ID NO: 30943 - RNA, 21 nt, synthetic construct
  source 1..21: mol_type = other RNA
ccctgcctgccactgcctgcg

SEQ ID NO: 30944 - RNA, 21 nt, synthetic construct
  source 1..21: mol_type = other RNA
ccgaccagattcccagtatgt

SEQ ID NO: 30945 - RNA, 21 nt, synthetic construct
  source 1..21: mol_type = other RNA
ccggaggctggctcctggttg

SEQ ID NO: 30946 - RNA, 21 nt, synthetic construct
  source 1..21: mol_type = other RNA
ccggccagatgcgcctggaga

SEQ ID NO: 30947 - RNA, 21 nt, synthetic construct
  source 1..21: mol_type = other RNA
cctaacatactgggaatctgg

SEQ ID NO: 30948 - RNA, 21 nt, synthetic construct
  source 1..21: mol_type = other RNA
cctagtgggaccagtgagcga

SEQ ID NO: 30949 - RNA, 21 nt, synthetic construct
  source 1..21: mol_type = other RNA
cctcacagctgagccccccac

SEQ ID NO: 30950 - RNA, 21 nt, synthetic construct
  source 1..21: mol_type = other RNA
cctccaagcacccagtctcta

SEQ ID NO: 30951 - RNA, 21 nt, synthetic construct
  source 1..21: mol_type = other RNA
cctccggccagatgcgcctgg

SEQ ID NO: 30952 - RNA, 21 nt, synthetic construct
  source 1..21: mol_type = other RNA
cctgccactgcctgcgctgtt

SEQ ID NO: 30953 - RNA, 21 nt, synthetic construct
  source 1..21: mol_type = other RNA
cctgccctgcctgccactgcc

SEQ ID NO: 30954 - RNA, 21 nt, synthetic construct
  source 1..21: mol_type = other RNA
cctgcctgccactgcctgcgc

SEQ ID NO: 30955 - RNA, 21 nt, synthetic construct
  source 1..21: mol_type = other RNA
cctgcgctgttcaaccaggag

SEQ ID NO: 30956 - RNA, 21 nt, synthetic construct
  source 1..21: mol_type = other RNA
cctggagaaaaccgaccagat

SEQ ID NO: 30957 - RNA, 21 nt, synthetic construct
  source 1..21: mol_type = other RNA
cctggttgaacagcgcaggca

SEQ ID NO: 30958 - RNA, 21 nt, synthetic construct
  source 1..21: mol_type = other RNA
cgaccagattcccagtatgtt

SEQ ID NO: 30959 - RNA, 21 nt, synthetic construct
  source 1..21: mol_type = other RNA
cgactgctccaccctgccctg

SEQ ID NO: 30960 - RNA, 21 nt, synthetic construct
  source 1..21: mol_type = other RNA
cgcaggcagtggcaggcaggg

SEQ ID NO: 30961 - RNA, 21 nt, synthetic construct
  source 1..21: mol_type = other RNA
cgcatctggccggaggctggc

SEQ ID NO: 30962 - RNA, 21 nt, synthetic construct
  source 1..21: mol_type = other RNA
cgcctggagaaaaccgaccag

SEQ ID NO: 30963 - RNA, 21 nt, synthetic construct
  source 1..21: mol_type = other RNA
cgctcactggtcccactagga

SEQ ID NO: 30964 - RNA, 21 nt, synthetic construct
  source 1..21: mol_type = other RNA
cgctgttcaaccaggagccag

SEQ ID NO: 30965 - RNA, 21 nt, synthetic construct
  source 1..21: mol_type = other RNA
cggaggctggctcctggttga

SEQ ID NO: 30966 - RNA, 21 nt, synthetic construct
  source 1..21: mol_type = other RNA
cggccagatgcgcctggagaa

SEQ ID NO: 30967 - RNA, 21 nt, synthetic construct
  source 1..21: mol_type = other RNA
cggttttctccaggcgcatct

SEQ ID NO: 30968 - RNA, 21 nt, synthetic construct
  source 1..21: mol_type = other RNA
ctaacacagcccacttcctca

SEQ ID NO: 30969 - RNA, 21 nt, synthetic construct
  source 1..21: mol_type = other RNA
ctaacatactgggaatctggt

SEQ ID NO: 30970 - RNA, 21 nt, synthetic construct
  source 1..21: mol_type = other RNA
ctaggagactgccagtcacca

SEQ ID NO: 30971 - RNA, 21 nt, synthetic construct
  source 1..21: mol_type = other RNA
ctagtgggaccagtgagcgac

SEQ ID NO: 30972 - RNA, 21 nt, synthetic construct
  source 1..21: mol_type = other RNA
ctcacagctgagccccccact

SEQ ID NO: 30973 - RNA, 21 nt, synthetic construct
  source 1..21: mol_type = other RNA
ctcactggtcccactaggaga

SEQ ID NO: 30974 - RNA, 21 nt, synthetic construct
  source 1..21: mol_type = other RNA
ctcagctgtgaggaagtgggc

SEQ ID NO: 30975 - RNA, 21 nt, synthetic construct
  source 1..21: mol_type = other RNA
ctccaagcacccagtctctaa

SEQ ID NO: 30976 - RNA, 21 nt, synthetic construct
  source 1..21: mol_type = other RNA
ctccaagccccctaacatact

SEQ ID NO: 30977 - RNA, 21 nt, synthetic construct
  source 1..21: mol_type = other RNA
ctccaccctgccctgcctgcc

SEQ ID NO: 30978 - RNA, 21 nt, synthetic construct
  source 1..21: mol_type = other RNA
ctccaggcgcatctggccgga

SEQ ID NO: 30979 - RNA, 21 nt, synthetic construct
  source 1..21: mol_type = other RNA
ctccggccagatgcgcctgga

SEQ ID NO: 30980 - RNA, 21 nt, synthetic construct
  source 1..21: mol_type = other RNA
ctcctagtgggaccagtgagc

SEQ ID NO: 30981 - RNA, 21 nt, synthetic construct
  source 1..21: mol_type = other RNA
ctcctggttgaacagcgcagg

SEQ ID NO: 30982 - RNA, 21 nt, synthetic construct
  source 1..21: mol_type = other RNA
ctctaacacagcccacttcct

SEQ ID NO: 30983 - RNA, 21 nt, synthetic construct
  source 1..21: mol_type = other RNA
ctctccaagccccctaacata

SEQ ID NO: 30984 - RNA, 21 nt, synthetic construct
  source 1..21: mol_type = other RNA
ctctctccaagccccctaaca

SEQ ID NO: 30985 - RNA, 21 nt, synthetic construct
  source 1..21: mol_type = other RNA
ctgagccccccactgtggtga

SEQ ID NO: 30986 - RNA, 21 nt, synthetic construct
  source 1..21: mol_type = other RNA
ctgccactgcctgcgctgttc

SEQ ID NO: 30987 - RNA, 21 nt, synthetic construct
  source 1..21: mol_type = other RNA
ctgccagtcaccacagtgggg

SEQ ID NO: 30988 - RNA, 21 nt, synthetic construct
  source 1..21: mol_type = other RNA
ctgccctgcctgccactgcct

SEQ ID NO: 30989 - RNA, 21 nt, synthetic construct
  source 1..21: mol_type = other RNA
ctgcctgccactgcctgcgct

SEQ ID NO: 30990 - RNA, 21 nt, synthetic construct
  source 1..21: mol_type = other RNA
ctgcctgcgctgttcaaccag

SEQ ID NO: 30991 - RNA, 21 nt, synthetic construct
  source 1..21: mol_type = other RNA
ctgcgctgttcaaccaggagc

SEQ ID NO: 30992 - RNA, 21 nt, synthetic construct
  source 1..21: mol_type = other RNA
ctgctccaccctgccctgcct

SEQ ID NO: 30993 - RNA, 21 nt, synthetic construct
  source 1..21: mol_type = other RNA
ctggagaaaaccgaccagatt

SEQ ID NO: 30994 - RNA, 21 nt, synthetic construct
  source 1..21: mol_type = other RNA
ctggcagtctcctagtgggac

SEQ ID NO: 30995 - RNA, 21 nt, synthetic construct
  source 1..21: mol_type = other RNA
ctggccggaggctggctcctg

SEQ ID NO: 30996 - RNA, 21 nt, synthetic construct
  source 1..21: mol_type = other RNA
ctggctcctggttgaacagcg

SEQ ID NO: 30997 - RNA, 21 nt, synthetic construct
  source 1..21: mol_type = other RNA
ctgggaatctggtcggttttc

SEQ ID NO: 30998 - RNA, 21 nt, synthetic construct
  source 1..21: mol_type = other RNA
ctggtcccactaggagactgc

SEQ ID NO: 30999 - RNA, 21 nt, synthetic construct
  source 1..21: mol_type = other RNA
ctggtcggttttctccaggcg

SEQ ID NO: 31000 - RNA, 21 nt, synthetic construct
  source 1..21: mol_type = other RNA
ctggttgaacagcgcaggcag

SEQ ID NO: 31001 - RNA, 21 nt, synthetic construct
  source 1..21: mol_type = other RNA
ctgtgaggaagtgggctgtgt

SEQ ID NO: 31002 - RNA, 21 nt, synthetic construct
  source 1..21: mol_type = other RNA
ctgtggtgactggcagtctcc

SEQ ID NO: 31003 - RNA, 21 nt, synthetic construct
  source 1..21: mol_type = other RNA
ctgtgttagagactgggtgct

SEQ ID NO: 31004 - RNA, 21 nt, synthetic construct
  source 1..21: mol_type = other RNA
ctgttcaaccaggagccagcc

SEQ ID NO: 31005 - RNA, 21 nt, synthetic construct
  source 1..21: mol_type = other RNA
cttcctcacagctgagccccc

SEQ ID NO: 31006 - RNA, 21 nt, synthetic construct
  source 1..21: mol_type = other RNA
cttggagagagtgggctttct

SEQ ID NO: 31007 - RNA, 21 nt, synthetic construct
  source 1..21: mol_type = other RNA
gaaaaccgaccagattcccag

SEQ ID NO: 31008 - RNA, 21 nt, synthetic construct
  source 1..21: mol_type = other RNA
gaaagcccactctctccaagc

SEQ ID NO: 31009 - RNA, 21 nt, synthetic construct
  source 1..21: mol_type = other RNA
gaacagcgcaggcagtggcag

SEQ ID NO: 31010 - RNA, 21 nt, synthetic construct
  source 1..21: mol_type = other RNA
gaagtgggctgtgttagagac

SEQ ID NO: 31011 - RNA, 21 nt, synthetic construct
  source 1..21: mol_type = other RNA
gaatctggtcggttttctcca

SEQ ID NO: 31012 - RNA, 21 nt, synthetic construct
  source 1..21: mol_type = other RNA
gaccagattcccagtatgtta

SEQ ID NO: 31013 - RNA, 21 nt, synthetic construct
  source 1..21: mol_type = other RNA
gaccagtgagcgactgctcca

SEQ ID NO: 31014 - RNA, 21 nt, synthetic construct
  source 1..21: mol_type = other RNA
gactgccagtcaccacagtgg

SEQ ID NO: 31015 - RNA, 21 nt, synthetic construct
  source 1..21: mol_type = other RNA
gactgctccaccctgccctgc

SEQ ID NO: 31016 - RNA, 21 nt, synthetic construct
  source 1..21: mol_type = other RNA
gactggcagtctcctagtggg

SEQ ID NO: 31017 - RNA, 21 nt, synthetic construct
  source 1..21: mol_type = other RNA
gagaaaaccgaccagattccc

SEQ ID NO: 31018 - RNA, 21 nt, synthetic construct
  source 1..21: mol_type = other RNA
gagaaagcccactctctccaa

SEQ ID NO: 31019 - RNA, 21 nt, synthetic construct
  source 1..21: mol_type = other RNA
gagactgccagtcaccacagt

SEQ ID NO: 31020 - RNA, 21 nt, synthetic construct
  source 1..21: mol_type = other RNA
gagcagtcgctcactggtccc

SEQ ID NO: 31021 - RNA, 21 nt, synthetic construct
  source 1..21: mol_type = other RNA
gagccagcctccggccagatg

SEQ ID NO: 31022 - RNA, 21 nt, synthetic construct
  source 1..21: mol_type = other RNA
gagccccccactgtggtgact

SEQ ID NO: 31023 - RNA, 21 nt, synthetic construct
  source 1..21: mol_type = other RNA
gagcgactgctccaccctgcc

SEQ ID NO: 31024 - RNA, 21 nt, synthetic construct
  source 1..21: mol_type = other RNA
gaggaagtgggctgtgttaga

SEQ ID NO: 31025 - RNA, 21 nt, synthetic construct
  source 1..21: mol_type = other RNA
gaggctggctcctggttgaac

SEQ ID NO: 31026 - RNA, 21 nt, synthetic construct
  source 1..21: mol_type = other RNA
gagggagaaagcccactctct

SEQ ID NO: 31027 - RNA, 21 nt, synthetic construct
  source 1..21: mol_type = other RNA
gatgcgcctggagaaaaccga

SEQ ID NO: 31028 - RNA, 21 nt, synthetic construct
  source 1..21: mol_type = other RNA
gattcccagtatgttaggggg

SEQ ID NO: 31029 - RNA, 21 nt, synthetic construct
  source 1..21: mol_type = other RNA
gcacccagtctctaacacagc

SEQ ID NO: 31030 - RNA, 21 nt, synthetic construct
  source 1..21: mol_type = other RNA
gcaggcagggcagggtggagc

SEQ ID NO: 31031 - RNA, 21 nt, synthetic construct
  source 1..21: mol_type = other RNA
gcaggcagtggcaggcagggc

SEQ ID NO: 31032 - RNA, 21 nt, synthetic construct
  source 1..21: mol_type = other RNA
gcagggcagggtggagcagtc

SEQ ID NO: 31033 - RNA, 21 nt, synthetic construct
  source 1..21: mol_type = other RNA
gcagggtggagcagtcgctca

SEQ ID NO: 31034 - RNA, 21 nt, synthetic construct
  source 1..21: mol_type = other RNA
gcagtcgctcactggtcccac

SEQ ID NO: 31035 - RNA, 21 nt, synthetic construct
  source 1..21: mol_type = other RNA
gcagtctcctagtgggaccag

SEQ ID NO: 31036 - RNA, 21 nt, synthetic construct
  source 1..21: mol_type = other RNA
gcagtggcaggcagggcaggg

SEQ ID NO: 31037 - RNA, 21 nt, synthetic construct
  source 1..21: mol_type = other RNA
gcatctggccggaggctggct

SEQ ID NO: 31038 - RNA, 21 nt, synthetic construct
  source 1..21: mol_type = other RNA
gccactgcctgcgctgttcaa

SEQ ID NO: 31039 - RNA, 21 nt, synthetic construct
  source 1..21: mol_type = other RNA
gccagatgcgcctggagaaaa

SEQ ID NO: 31040 - RNA, 21 nt, synthetic construct
  source 1..21: mol_type = other RNA
gccagcctccggccagatgcg

SEQ ID NO: 31041 - RNA, 21 nt, synthetic construct
  source 1..21: mol_type = other RNA
gccagtcaccacagtgggggg

SEQ ID NO: 31042 - RNA, 21 nt, synthetic construct
  source 1..21: mol_type = other RNA
gcccactctctccaagccccc

SEQ ID NO: 31043 - RNA, 21 nt, synthetic construct
  source 1..21: mol_type = other RNA
gcccacttcctcacagctgag

SEQ ID NO: 31044 - RNA, 21 nt, synthetic construct
  source 1..21: mol_type = other RNA
gccccccactgtggtgactgg

SEQ ID NO: 31045 - RNA, 21 nt, synthetic construct
  source 1..21: mol_type = other RNA
gccccctaacatactgggaat

SEQ ID NO: 31046 - RNA, 21 nt, synthetic construct
  source 1..21: mol_type = other RNA
gcccctccaagcacccagtct

SEQ ID NO: 31047 - RNA, 21 nt, synthetic construct
  source 1..21: mol_type = other RNA
gccctgcctgccactgcctgc

SEQ ID NO: 31048 - RNA, 21 nt, synthetic construct
  source 1..21: mol_type = other RNA
gccggaggctggctcctggtt

SEQ ID NO: 31049 - RNA, 21 nt, synthetic construct
  source 1..21: mol_type = other RNA
gcctccggccagatgcgcctg

SEQ ID NO: 31050 - RNA, 21 nt, synthetic construct
  source 1..21: mol_type = other RNA
gcctgccactgcctgcgctgt

SEQ ID NO: 31051 - RNA, 21 nt, synthetic construct
  source 1..21: mol_type = other RNA
gcctgcgctgttcaaccagga

SEQ ID NO: 31052 - RNA, 21 nt, synthetic construct
  source 1..21: mol_type = other RNA
gcctggagaaaaccgaccaga

SEQ ID NO: 31053 - RNA, 21 nt, synthetic construct
  source 1..21: mol_type = other RNA
gcgactgctccaccctgccct

SEQ ID NO: 31054 - RNA, 21 nt, synthetic construct
  source 1..21: mol_type = other RNA
gcgcaggcagtggcaggcagg

SEQ ID NO: 31055 - RNA, 21 nt, synthetic construct
  source 1..21: mol_type = other RNA
gcgcatctggccggaggctgg

SEQ ID NO: 31056 - RNA, 21 nt, synthetic construct
  source 1..21: mol_type = other RNA
gcgcctggagaaaaccgacca

SEQ ID NO: 31057 - RNA, 21 nt, synthetic construct
  source 1..21: mol_type = other RNA
gcgctgttcaaccaggagcca

SEQ ID NO: 31058 - RNA, 21 nt, synthetic construct
  source 1..21: mol_type = other RNA
gctcactggtcccactaggag

SEQ ID NO: 31059 - RNA, 21 nt, synthetic construct
  source 1..21: mol_type = other RNA
gctcagctgtgaggaagtggg

SEQ ID NO: 31060 - RNA, 21 nt, synthetic construct
  source 1..21: mol_type = other RNA
gctccaccctgccctgcctgc

SEQ ID NO: 31061 - RNA, 21 nt, synthetic construct
  source 1..21: mol_type = other RNA
gctcctggttgaacagcgcag

SEQ ID NO: 31062 - RNA, 21 nt, synthetic construct
  source 1..21: mol_type = other RNA
gctgagccccccactgtggtg

SEQ ID NO: 31063 - RNA, 21 nt, synthetic construct
  source 1..21: mol_type = other RNA
gctggctcctggttgaacagc

SEQ ID NO: 31064 - RNA, 21 nt, synthetic construct
  source 1..21: mol_type = other RNA
gctgtgaggaagtgggctgtg

SEQ ID NO: 31065 - RNA, 21 nt, synthetic construct
  source 1..21: mol_type = other RNA
gctgtgttagagactgggtgc

SEQ ID NO: 31066 - RNA, 21 nt, synthetic construct
  source 1..21: mol_type = other RNA
gctgttcaaccaggagccagc

SEQ ID NO: 31067 - RNA, 21 nt, synthetic construct
  source 1..21: mol_type = other RNA
gcttggagagagtgggctttc

SEQ ID NO: 31068 - RNA, 21 nt, synthetic construct
  source 1..21: mol_type = other RNA
ggaagtgggctgtgttagaga

SEQ ID NO: 31069 - RNA, 21 nt, synthetic construct
  source 1..21: mol_type = other RNA
ggaatctggtcggttttctcc

SEQ ID NO: 31070 - RNA, 21 nt, synthetic construct
  source 1..21: mol_type = other RNA
ggaccagtgagcgactgctcc

SEQ ID NO: 31071 - RNA, 21 nt, synthetic construct
  source 1..21: mol_type = other RNA
ggagaaaaccgaccagattcc

SEQ ID NO: 31072 - RNA, 21 nt, synthetic construct
  source 1..21: mol_type = other RNA
ggagaaagcccactctctcca

SEQ ID NO: 31073 - RNA, 21 nt, synthetic construct
  source 1..21: mol_type = other RNA
ggagactgccagtcaccacag

SEQ ID NO: 31074 - RNA, 21 nt, synthetic construct
  source 1..21: mol_type = other RNA
ggagagagtgggctttctccc

SEQ ID NO: 31075 - RNA, 21 nt, synthetic construct
  source 1..21: mol_type = other RNA
ggagcagtcgctcactggtcc

SEQ ID NO: 31076 - RNA, 21 nt, synthetic construct
  source 1..21: mol_type = other RNA
ggagccagcctccggccagat

SEQ ID NO: 31077 - RNA, 21 nt, synthetic construct
  source 1..21: mol_type = other RNA
ggaggctggctcctggttgaa

SEQ ID NO: 31078 - RNA, 21 nt, synthetic construct
  source 1..21: mol_type = other RNA
ggcaggcagggcagggtggag

SEQ ID NO: 31079 - RNA, 21 nt, synthetic construct
  source 1..21: mol_type = other RNA
ggcagggcagggtggagcagt

SEQ ID NO: 31080 - RNA, 21 nt, synthetic construct
  source 1..21: mol_type = other RNA
ggcagggtggagcagtcgctc

SEQ ID NO: 31081 - RNA, 21 nt, synthetic construct
  source 1..21: mol_type = other RNA
ggcagtctcctagtgggacca

SEQ ID NO: 31082 - RNA, 21 nt, synthetic construct
  source 1..21: mol_type = other RNA
ggcagtggcaggcagggcagg

SEQ ID NO: 31083 - RNA, 21 nt, synthetic construct
  source 1..21: mol_type = other RNA
ggccagatgcgcctggagaaa

SEQ ID NO: 31084 - RNA, 21 nt, synthetic construct
  source 1..21: mol_type = other RNA
ggcccctccaagcacccagtc

SEQ ID NO: 31085 - RNA, 21 nt, synthetic construct
  source 1..21: mol_type = other RNA
ggccggaggctggctcctggt

SEQ ID NO: 31086 - RNA, 21 nt, synthetic construct
  source 1..21: mol_type = other RNA
ggcgcatctggccggaggctg

SEQ ID NO: 31087 - RNA, 21 nt, synthetic construct
  source 1..21: mol_type = other RNA
ggctcagctgtgaggaagtgg

SEQ ID NO: 31088 - RNA, 21 nt, synthetic construct
  source 1..21: mol_type = other RNA
ggctcctggttgaacagcgca

SEQ ID NO: 31089 - RNA, 21 nt, synthetic construct
  source 1..21: mol_type = other RNA
ggctggctcctggttgaacag

SEQ ID NO: 31090 - RNA, 21 nt, synthetic construct
  source 1..21: mol_type = other RNA
ggctgtgttagagactgggtg

SEQ ID NO: 31091 - RNA, 21 nt, synthetic construct
  source 1..21: mol_type = other RNA
ggcttggagagagtgggcttt

SEQ ID NO: 31092 - RNA, 21 nt, synthetic construct
  source 1..21: mol_type = other RNA
gggaatctggtcggttttctc

SEQ ID NO: 31093 - RNA, 21 nt, synthetic construct
  source 1..21: mol_type = other RNA
gggaccagtgagcgactgctc

SEQ ID NO: 31094 - RNA, 21 nt, synthetic construct
  source 1..21: mol_type = other RNA
gggagaaagcccactctctcc

SEQ ID NO: 31095 - RNA, 21 nt, synthetic construct
  source 1..21: mol_type = other RNA
gggcagggtggagcagtcgct

SEQ ID NO: 31096 - RNA, 21 nt, synthetic construct
  source 1..21: mol_type = other RNA
gggctcagctgtgaggaagtg

SEQ ID NO: 31097 - RNA, 21 nt, synthetic construct
  source 1..21: mol_type = other RNA
gggctgtgttagagactgggt

SEQ ID NO: 31098 - RNA, 21 nt, synthetic construct
  source 1..21: mol_type = other RNA
gggcttggagagagtgggctt

SEQ ID NO: 31099 - RNA, 21 nt, synthetic construct
  source 1..21: mol_type = other RNA
ggggctcagctgtgaggaagt

SEQ ID NO: 31100 - RNA, 21 nt, synthetic construct
  source 1..21: mol_type = other RNA
ggggcttggagagagtgggct

SEQ ID NO: 31101 - RNA, 21 nt, synthetic construct
  source 1..21: mol_type = other RNA
gggggctcagctgtgaggaag

SEQ ID NO: 31102 - RNA, 21 nt, synthetic construct
  source 1..21: mol_type = other RNA
gggggcttggagagagtgggc

SEQ ID NO: 31103 - RNA, 21 nt, synthetic construct
  source 1..21: mol_type = other RNA
ggggggctcagctgtgaggaa

SEQ ID NO: 31104 - RNA, 21 nt, synthetic construct
  source 1..21: mol_type = other RNA
gggtggagcagtcgctcactg

SEQ ID NO: 31105 - RNA, 21 nt, synthetic construct
  source 1..21: mol_type = other RNA
ggtcccactaggagactgcca

SEQ ID NO: 31106 - RNA, 21 nt, synthetic construct
  source 1..21: mol_type = other RNA
ggtcggttttctccaggcgca

SEQ ID NO: 31107 - RNA, 21 nt, synthetic construct
  source 1..21: mol_type = other RNA
ggtgactggcagtctcctagt

SEQ ID NO: 31108 - RNA, 21 nt, synthetic construct
  source 1..21: mol_type = other RNA
ggtggagcagtcgctcactgg

SEQ ID NO: 31109 - RNA, 21 nt, synthetic construct
  source 1..21: mol_type = other RNA
ggttgaacagcgcaggcagtg

SEQ ID NO: 31110 - RNA, 21 nt, synthetic construct
  source 1..21: mol_type = other RNA
ggttttctccaggcgcatctg

SEQ ID NO: 31111 - RNA, 21 nt, synthetic construct
  source 1..21: mol_type = other RNA
gtatgttagggggcttggaga

SEQ ID NO: 31112 - RNA, 21 nt, synthetic construct
  source 1..21: mol_type = other RNA
gtcaccacagtggggggctca

SEQ ID NO: 31113 - RNA, 21 nt, synthetic construct
  source 1..21: mol_type = other RNA
gtcccactaggagactgccag

SEQ ID NO: 31114 - RNA, 21 nt, synthetic construct
  source 1..21: mol_type = other RNA
gtcgctcactggtcccactag

SEQ ID NO: 31115 - RNA, 21 nt, synthetic construct
  source 1..21: mol_type = other RNA
gtcggttttctccaggcgcat

SEQ ID NO: 31116 - RNA, 21 nt, synthetic construct
  source 1..21: mol_type = other RNA
gtctcctagtgggaccagtga

SEQ ID NO: 31117 - RNA, 21 nt, synthetic construct
  source 1..21: mol_type = other RNA
gtctctaacacagcccacttc

SEQ ID NO: 31118 - RNA, 21 nt, synthetic construct
  source 1..21: mol_type = other RNA
gtgactggcagtctcctagtg

SEQ ID NO: 31119 - RNA, 21 nt, synthetic construct
  source 1..21: mol_type = other RNA
gtgagcgactgctccaccctg

SEQ ID NO: 31120 - RNA, 21 nt, synthetic construct
  source 1..21: mol_type = other RNA
gtgaggaagtgggctgtgtta

SEQ ID NO: 31121 - RNA, 21 nt, synthetic construct
  source 1..21: mol_type = other RNA
gtggagcagtcgctcactggt

SEQ ID NO: 31122 - RNA, 21 nt, synthetic construct
  source 1..21: mol_type = other RNA
gtggcaggcagggcagggtgg

SEQ ID NO: 31123 - RNA, 21 nt, synthetic construct
  source 1..21: mol_type = other RNA
gtgggaccagtgagcgactgc

SEQ ID NO: 31124 - RNA, 21 nt, synthetic construct
  source 1..21: mol_type = other RNA
gtgggctgtgttagagactgg

SEQ ID NO: 31125 - RNA, 21 nt, synthetic construct
  source 1..21: mol_type = other RNA
gtggggggctcagctgtgagg

SEQ ID NO: 31126 - RNA, 21 nt, synthetic construct
  source 1..21: mol_type = other RNA
gtggtgactggcagtctccta

SEQ ID NO: 31127 - RNA, 21 nt, synthetic construct
  source 1..21: mol_type = other RNA
gtgttagagactgggtgcttg

SEQ ID NO: 31128 - RNA, 21 nt, synthetic construct
  source 1..21: mol_type = other RNA
gttagggggcttggagagagt

SEQ ID NO: 31129 - RNA, 21 nt, synthetic construct
  source 1..21: mol_type = other RNA
gttcaaccaggagccagcctc

SEQ ID NO: 31130 - RNA, 21 nt, synthetic construct
  source 1..21: mol_type = other RNA
gttgaacagcgcaggcagtgg

SEQ ID NO: 31131 - RNA, 21 nt, synthetic construct
  source 1..21: mol_type = other RNA
gttttctccaggcgcatctgg

SEQ ID NO: 31132 - RNA, 21 nt, synthetic construct
  source 1..21: mol_type = other RNA
taacacagcccacttcctcac

SEQ ID NO: 31133 - RNA, 21 nt, synthetic construct
  source 1..21: mol_type = other RNA
taacatactgggaatctggtc

SEQ ID NO: 31134 - RNA, 21 nt, synthetic construct
  source 1..21: mol_type = other RNA
tactgggaatctggtcggttt

SEQ ID NO: 31135 - RNA, 21 nt, synthetic construct
  source 1..21: mol_type = other RNA
taggagactgccagtcaccac

SEQ ID NO: 31136 - RNA, 21 nt, synthetic construct
  source 1..21: mol_type = other RNA
tagggggcttggagagagtgg

SEQ ID NO: 31137 - RNA, 21 nt, synthetic construct
  source 1..21: mol_type = other RNA
tagtgggaccagtgagcgact

SEQ ID NO: 31138 - RNA, 21 nt, synthetic construct
  source 1..21: mol_type = other RNA
tatgttagggggcttggagag

SEQ ID NO: 31139 - RNA, 21 nt, synthetic construct
  source 1..21: mol_type = other RNA
tcaaccaggagccagcctccg

SEQ ID NO: 31140 - RNA, 21 nt, synthetic construct
  source 1..21: mol_type = other RNA
tcacagctgagccccccactg

SEQ ID NO: 31141 - RNA, 21 nt, synthetic construct
  source 1..21: mol_type = other RNA
tcaccacagtggggggctcag

SEQ ID NO: 31142 - RNA, 21 nt, synthetic construct
  source 1..21: mol_type = other RNA
tcactggtcccactaggagac

SEQ ID NO: 31143 - RNA, 21 nt, synthetic construct
  source 1..21: mol_type = other RNA
tcagctgtgaggaagtgggct

SEQ ID NO: 31144 - RNA, 21 nt, synthetic construct
  source 1..21: mol_type = other RNA
tccaagcacccagtctctaac

SEQ ID NO: 31145 - RNA, 21 nt, synthetic construct
  source 1..21: mol_type = other RNA
tccaagccccctaacatactg

SEQ ID NO: 31146 - RNA, 21 nt, synthetic construct
  source 1..21: mol_type = other RNA
tccaccctgccctgcctgcca

SEQ ID NO: 31147 - RNA, 21 nt, synthetic construct
  source 1..21: mol_type = other RNA
tccaggcgcatctggccggag

SEQ ID NO: 31148 - RNA, 21 nt, synthetic construct
  source 1..21: mol_type = other RNA
tcccaagagggagaaagccca

SEQ ID NO: 31149 - RNA, 21 nt, synthetic construct
  source 1..21: mol_type = other RNA
tcccactaggagactgccagt

SEQ ID NO: 31150 - RNA, 21 nt, synthetic construct
  source 1..21: mol_type = other RNA
tcccagtatgttagggggctt

SEQ ID NO: 31151 - RNA, 21 nt, synthetic construct
  source 1..21: mol_type = other RNA
tccggccagatgcgcctggag

SEQ ID NO: 31152 - RNA, 21 nt, synthetic construct
  source 1..21: mol_type = other RNA
tcctagtgggaccagtgagcg

SEQ ID NO: 31153 - RNA, 21 nt, synthetic construct
  source 1..21: mol_type = other RNA
tcctcacagctgagcccccca

SEQ ID NO: 31154 - RNA, 21 nt, synthetic construct
  source 1..21: mol_type = other RNA
tcctggttgaacagcgcaggc

SEQ ID NO: 31155 - RNA, 21 nt, synthetic construct
  source 1..21: mol_type = other RNA
tcgctcactggtcccactagg

SEQ ID NO: 31156 - RNA, 21 nt, synthetic construct
  source 1..21: mol_type = other RNA
tcggttttctccaggcgcatc

SEQ ID NO: 31157 - RNA, 21 nt, synthetic construct
  source 1..21: mol_type = other RNA
tctaacacagcccacttcctc

SEQ ID NO: 31158 - RNA, 21 nt, synthetic construct
  source 1..21: mol_type = other RNA
tctccaagccccctaacatac

SEQ ID NO: 31159 - RNA, 21 nt, synthetic construct
  source 1..21: mol_type = other RNA
tctccaggcgcatctggccgg

SEQ ID NO: 31160 - RNA, 21 nt, synthetic construct
  source 1..21: mol_type = other RNA
tctcctagtgggaccagtgag

SEQ ID NO: 31161 - RNA, 21 nt, synthetic construct
  source 1..21: mol_type = other RNA
tctctaacacagcccacttcc

SEQ ID NO: 31162 - RNA, 21 nt, synthetic construct
  source 1..21: mol_type = other RNA
tctctccaagccccctaacat

SEQ ID NO: 31163 - RNA, 21 nt, synthetic construct
  source 1..21: mol_type = other RNA
tctggccggaggctggctcct

SEQ ID NO: 31164 - RNA, 21 nt, synthetic construct
  source 1..21: mol_type = other RNA
tctggtcggttttctccaggc

SEQ ID NO: 31165 - RNA, 21 nt, synthetic construct
  source 1..21: mol_type = other RNA
tgaacagcgcaggcagtggca

SEQ ID NO: 31166 - RNA, 21 nt, synthetic construct
  source 1..21: mol_type = other RNA
tgactggcagtctcctagtgg

SEQ ID NO: 31167 - RNA, 21 nt, synthetic construct
  source 1..21: mol_type = other RNA
tgagccccccactgtggtgac

SEQ ID NO: 31168 - RNA, 21 nt, synthetic construct
  source 1..21: mol_type = other RNA
tgagcgactgctccaccctgc

SEQ ID NO: 31169 - RNA, 21 nt, synthetic construct
  source 1..21: mol_type = other RNA
tgaggaagtgggctgtgttag

SEQ ID NO: 31170 - RNA, 21 nt, synthetic construct
  source 1..21: mol_type = other RNA
tgccactgcctgcgctgttca

SEQ ID NO: 31171 - RNA, 21 nt, synthetic construct
  source 1..21: mol_type = other RNA
tgccagtcaccacagtggggg

SEQ ID NO: 31172 - RNA, 21 nt, synthetic construct
  source 1..21: mol_type = other RNA
tgccctgcctgccactgcctg

SEQ ID NO: 31173 - RNA, 21 nt, synthetic construct
  source 1..21: mol_type = other RNA
tgcctgccactgcctgcgctg

SEQ ID NO: 31174 - RNA, 21 nt, synthetic construct
  source 1..21: mol_type = other RNA
tgcctgcgctgttcaaccagg

SEQ ID NO: 31175 - RNA, 21 nt, synthetic construct
  source 1..21: mol_type = other RNA
tgcgcctggagaaaaccgacc

SEQ ID NO: 31176 - RNA, 21 nt, synthetic construct
  source 1..21: mol_type = other RNA
tgcgctgttcaaccaggagcc

SEQ ID NO: 31177 - RNA, 21 nt, synthetic construct
  source 1..21: mol_type = other RNA
tgctccaccctgccctgcctg

SEQ ID NO: 31178 - RNA, 21 nt, synthetic construct
  source 1..21: mol_type = other RNA
tggagaaaaccgaccagattc

SEQ ID NO: 31179 - RNA, 21 nt, synthetic construct
  source 1..21: mol_type = other RNA
tggagagagtgggctttctcc

SEQ ID NO: 31180 - RNA, 21 nt, synthetic construct
  source 1..21: mol_type = other RNA
tggagcagtcgctcactggtc

SEQ ID NO: 31181 - RNA, 21 nt, synthetic construct
  source 1..21: mol_type = other RNA
tggcaggcagggcagggtgga

SEQ ID NO: 31182 - RNA, 21 nt, synthetic construct
  source 1..21: mol_type = other RNA
tggcagtctcctagtgggacc

SEQ ID NO: 31183 - RNA, 21 nt, synthetic construct
  source 1..21: mol_type = other RNA
tggccggaggctggctcctgg

SEQ ID NO: 31184 - RNA, 21 nt, synthetic construct
  source 1..21: mol_type = other RNA
tggctcctggttgaacagcgc

SEQ ID NO: 31185 - RNA, 21 nt, synthetic construct
  source 1..21: mol_type = other RNA
tgggaatctggtcggttttct

SEQ ID NO: 31186 - RNA, 21 nt, synthetic construct
  source 1..21: mol_type = other RNA
tgggaccagtgagcgactgct

SEQ ID NO: 31187 - RNA, 21 nt, synthetic construct
  source 1..21: mol_type = other RNA
tgggctgtgttagagactggg

SEQ ID NO: 31188 - RNA, 21 nt, synthetic construct
  source 1..21: mol_type = other RNA
tggggggctcagctgtgagga

SEQ ID NO: 31189 - RNA, 21 nt, synthetic construct
  source 1..21: mol_type = other RNA
tggtcccactaggagactgcc

SEQ ID NO: 31190 - RNA, 21 nt, synthetic construct
  source 1..21: mol_type = other RNA
tggtcggttttctccaggcgc

SEQ ID NO: 31191 - RNA, 21 nt, synthetic construct
  source 1..21: mol_type = other RNA
tggtgactggcagtctcctag

SEQ ID NO: 31192 - RNA, 21 nt, synthetic construct
  source 1..21: mol_type = other RNA
tggttgaacagcgcaggcagt

SEQ ID NO: 31193 - RNA, 21 nt, synthetic construct
  source 1..21: mol_type = other RNA
tgtgaggaagtgggctgtgtt

SEQ ID NO: 31194 - RNA, 21 nt, synthetic construct
  source 1..21: mol_type = other RNA
tgtggtgactggcagtctcct

SEQ ID NO: 31195 - RNA, 21 nt, synthetic construct
  source 1..21: mol_type = other RNA
tgtgttagagactgggtgctt

SEQ ID NO: 31196 - RNA, 21 nt, synthetic construct
  source 1..21: mol_type = other RNA
tgttagggggcttggagagag

SEQ ID NO: 31197 - RNA, 21 nt, synthetic construct
  source 1..21: mol_type = other RNA
tgttcaaccaggagccagcct

SEQ ID NO: 31198 - RNA, 21 nt, synthetic construct
  source 1..21: mol_type = other RNA
ttagggggcttggagagagtg

SEQ ID NO: 31199 - RNA, 21 nt, synthetic construct
  source 1..21: mol_type = other RNA
ttcaaccaggagccagcctcc

SEQ ID NO: 31200 - RNA, 21 nt, synthetic construct
  source 1..21: mol_type = other RNA
ttcccagtatgttagggggct

SEQ ID NO: 31201 - RNA, 21 nt, synthetic construct
  source 1..21: mol_type = other RNA
ttcctcacagctgagcccccc

SEQ ID NO: 31202 - RNA, 21 nt, synthetic construct
  source 1..21: mol_type = other RNA
ttctccaggcgcatctggccg

SEQ ID NO: 31203 - RNA, 21 nt, synthetic construct
  source 1..21: mol_type = other RNA
ttgaacagcgcaggcagtggc

SEQ ID NO: 31204 - RNA, 21 nt, synthetic construct
  source 1..21: mol_type = other RNA
ttggagagagtgggctttctc

SEQ ID NO: 31205 - RNA, 21 nt, synthetic construct
  source 1..21: mol_type = other RNA
tttctccaggcgcatctggcc

SEQ ID NO: 31206 - RNA, 21 nt, synthetic construct
  source 1..21: mol_type = other RNA
ttttctccaggcgcatctggc

SEQ ID NO: 31207 - RNA, 22 nt, synthetic construct
  source 1..22: mol_type = other RNA
aaaaccgaccagattcccagta

SEQ ID NO: 31208 - RNA, 22 nt, synthetic construct
  source 1..22: mol_type = other RNA
aaaccgaccagattcccagtat

SEQ ID NO: 31209 - RNA, 22 nt, synthetic construct
  source 1..22: mol_type = other RNA
aaagcccactctctccaagccc

SEQ ID NO: 31210 - RNA, 22 nt, synthetic construct
  source 1..22: mol_type = other RNA
aacacagcccacttcctcacag

SEQ ID NO: 31211 - RNA, 22 nt, synthetic construct
  source 1..22: mol_type = other RNA
aacagcgcaggcagtggcaggc

SEQ ID NO: 31212 - RNA, 22 nt, synthetic construct
  source 1..22: mol_type = other RNA
aacatactgggaatctggtcgg

SEQ ID NO: 31213 - RNA, 22 nt, synthetic construct
  source 1..22: mol_type = other RNA
aaccaggagccagcctccggcc

SEQ ID NO: 31214 - RNA, 22 nt, synthetic construct
  source 1..22: mol_type = other RNA
aaccgaccagattcccagtatg

SEQ ID NO: 31215 - RNA, 22 nt, synthetic construct
  source 1..22: mol_type = other RNA
aagagggagaaagcccactctc

SEQ ID NO: 31216 - RNA, 22 nt, synthetic construct
  source 1..22: mol_type = other RNA
aagcacccagtctctaacacag

SEQ ID NO: 31217 - RNA, 22 nt, synthetic construct
  source 1..22: mol_type = other RNA
aagcccactctctccaagcccc

SEQ ID NO: 31218 - RNA, 22 nt, synthetic construct
  source 1..22: mol_type = other RNA
aagccccctaacatactgggaa

SEQ ID NO: 31219 - RNA, 22 nt, synthetic construct
  source 1..22: mol_type = other RNA
aagtgggctgtgttagagactg

SEQ ID NO: 31220 - RNA, 22 nt, synthetic construct
  source 1..22: mol_type = other RNA
aatctggtcggttttctccagg

SEQ ID NO: 31221 - RNA, 22 nt, synthetic construct
  source 1..22: mol_type = other RNA
acacagcccacttcctcacagc

SEQ ID NO: 31222 - RNA, 22 nt, synthetic construct
  source 1..22: mol_type = other RNA
acagcccacttcctcacagctg

SEQ ID NO: 31223 - RNA, 22 nt, synthetic construct
  source 1..22: mol_type = other RNA
acagcgcaggcagtggcaggca

SEQ ID NO: 31224 - RNA, 22 nt, synthetic construct
  source 1..22: mol_type = other RNA
acagctgagccccccactgtgg

SEQ ID NO: 31225 - RNA, 22 nt, synthetic construct
  source 1..22: mol_type = other RNA
acagtggggggctcagctgtga

SEQ ID NO: 31226 - RNA, 22 nt, synthetic construct
  source 1..22: mol_type = other RNA
acatactgggaatctggtcggt

SEQ ID NO: 31227 - RNA, 22 nt, synthetic construct
  source 1..22: mol_type = other RNA
accacagtggggggctcagctg

SEQ ID NO: 31228 - RNA, 22 nt, synthetic construct
  source 1..22: mol_type = other RNA
accagattcccagtatgttagg

SEQ ID NO: 31229 - RNA, 22 nt, synthetic construct
  source 1..22: mol_type = other RNA
accaggagccagcctccggcca

SEQ ID NO: 31230 - RNA, 22 nt, synthetic construct
  source 1..22: mol_type = other RNA
accagtgagcgactgctccacc

SEQ ID NO: 31231 - RNA, 22 nt, synthetic construct
  source 1..22: mol_type = other RNA
acccagtctctaacacagccca

SEQ ID NO: 31232 - RNA, 22 nt, synthetic construct
  source 1..22: mol_type = other RNA
accctgccctgcctgccactgc

SEQ ID NO: 31233 - RNA, 22 nt, synthetic construct
  source 1..22: mol_type = other RNA
accgaccagattcccagtatgt

SEQ ID NO: 31234 - RNA, 22 nt, synthetic construct
  source 1..22: mol_type = other RNA
actaggagactgccagtcacca

SEQ ID NO: 31235 - RNA, 22 nt, synthetic construct
  source 1..22: mol_type = other RNA
actctctccaagccccctaaca

SEQ ID NO: 31236 - RNA, 22 nt, synthetic construct
  source 1..22: mol_type = other RNA
actgccagtcaccacagtgggg

SEQ ID NO: 31237 - RNA, 22 nt, synthetic construct
  source 1..22: mol_type = other RNA
actgcctgcgctgttcaaccag

SEQ ID NO: 31238 - RNA, 22 nt, synthetic construct
  source 1..22: mol_type = other RNA
actgctccaccctgccctgcct

SEQ ID NO: 31239 - RNA, 22 nt, synthetic construct
  source 1..22: mol_type = other RNA
actggcagtctcctagtgggac

SEQ ID NO: 31240 - RNA, 22 nt, synthetic construct
  source 1..22: mol_type = other RNA
actgggaatctggtcggttttc

SEQ ID NO: 31241 - RNA, 22 nt, synthetic construct
  source 1..22: mol_type = other RNA
actggtcccactaggagactgc

SEQ ID NO: 31242 - RNA, 22 nt, synthetic construct
  source 1..22: mol_type = other RNA
actgtggtgactggcagtctcc

SEQ ID NO: 31243 - RNA, 22 nt, synthetic construct
  source 1..22: mol_type = other RNA
acttcctcacagctgagccccc

SEQ ID NO: 31244 - RNA, 22 nt, synthetic construct
  source 1..22: mol_type = other RNA
agaaaaccgaccagattcccag

SEQ ID NO: 31245 - RNA, 22 nt, synthetic construct
  source 1..22: mol_type = other RNA
agaaagcccactctctccaagc

SEQ ID NO: 31246 - RNA, 22 nt, synthetic construct
  source 1..22: mol_type = other RNA
agactgccagtcaccacagtgg

SEQ ID NO: 31247 - RNA, 22 nt, synthetic construct
  source 1..22: mol_type = other RNA
agagggagaaagcccactctct

SEQ ID NO: 31248 - RNA, 22 nt, synthetic construct
  source 1..22: mol_type = other RNA
agatgcgcctggagaaaaccga

SEQ ID NO: 31249 - RNA, 22 nt, synthetic construct
  source 1..22: mol_type = other RNA
agattcccagtatgttaggggg

SEQ ID NO: 31250 - RNA, 22 nt, synthetic construct
  source 1..22: mol_type = other RNA
agcacccagtctctaacacagc

SEQ ID NO: 31251 - RNA, 22 nt, synthetic construct
  source 1..22: mol_type = other RNA
agcagtcgctcactggtcccac

SEQ ID NO: 31252 - RNA, 22 nt, synthetic construct
  source 1..22: mol_type = other RNA
agccagcctccggccagatgcg

SEQ ID NO: 31253 - RNA, 22 nt, synthetic construct
  source 1..22: mol_type = other RNA
agcccactctctccaagccccc

SEQ ID NO: 31254 - RNA, 22 nt, synthetic construct
  source 1..22: mol_type = other RNA
agcccacttcctcacagctgag

SEQ ID NO: 31255 - RNA, 22 nt, synthetic construct
  source 1..22: mol_type = other RNA
agccccccactgtggtgactgg

SEQ ID NO: 31256 - RNA, 22 nt, synthetic construct
  source 1..22: mol_type = other RNA
agccccctaacatactgggaat

SEQ ID NO: 31257 - RNA, 22 nt, synthetic construct
  source 1..22: mol_type = other RNA
agcctccggccagatgcgcctg

SEQ ID NO: 31258 - RNA, 22 nt, synthetic construct
  source 1..22: mol_type = other RNA
agcgactgctccaccctgccct

SEQ ID NO: 31259 - RNA, 22 nt, synthetic construct
  source 1..22: mol_type = other RNA
agcgcaggcagtggcaggcagg

SEQ ID NO: 31260 - RNA, 22 nt, synthetic construct
  source 1..22: mol_type = other RNA
agctgagccccccactgtggtg

SEQ ID NO: 31261 - RNA, 22 nt, synthetic construct
  source 1..22: mol_type = other RNA
agctgtgaggaagtgggctgtg

SEQ ID NO: 31262 - RNA, 22 nt, synthetic construct
  source 1..22: mol_type = other RNA
aggaagtgggctgtgttagaga

SEQ ID NO: 31263 - RNA, 22 nt, synthetic construct
  source 1..22: mol_type = other RNA
aggagactgccagtcaccacag

SEQ ID NO: 31264 - RNA, 22 nt, synthetic construct
  source 1..22: mol_type = other RNA
aggagccagcctccggccagat

SEQ ID NO: 31265 - RNA, 22 nt, synthetic construct
  source 1..22: mol_type = other RNA
aggcagggcagggtggagcagt

SEQ ID NO: 31266 - RNA, 22 nt, synthetic construct
  source 1..22: mol_type = other RNA
aggcagtggcaggcagggcagg

SEQ ID NO: 31267 - RNA, 22 nt, synthetic construct
  source 1..22: mol_type = other RNA
aggcgcatctggccggaggctg

SEQ ID NO: 31268 - RNA, 22 nt, synthetic construct
  source 1..22: mol_type = other RNA
aggctggctcctggttgaacag

SEQ ID NO: 31269 - RNA, 22 nt, synthetic construct
  source 1..22: mol_type = other RNA
agggagaaagcccactctctcc

SEQ ID NO: 31270 - RNA, 22 nt, synthetic construct
  source 1..22: mol_type = other RNA
agggcagggtggagcagtcgct

SEQ ID NO: 31271 - RNA, 22 nt, synthetic construct
  source 1..22: mol_type = other RNA
agggggcttggagagagtgggc

SEQ ID NO: 31272 - RNA, 22 nt, synthetic construct
  source 1..22: mol_type = other RNA
agggtggagcagtcgctcactg

SEQ ID NO: 31273 - RNA, 22 nt, synthetic construct
  source 1..22: mol_type = other RNA
agtatgttagggggcttggaga

SEQ ID NO: 31274 - RNA, 22 nt, synthetic construct
  source 1..22: mol_type = other RNA
agtcaccacagtggggggctca

SEQ ID NO: 31275 - RNA, 22 nt, synthetic construct
  source 1..22: mol_type = other RNA
agtcgctcactggtcccactag

SEQ ID NO: 31276 - RNA, 22 nt, synthetic construct
  source 1..22: mol_type = other RNA
agtctcctagtgggaccagtga

SEQ ID NO: 31277 - RNA, 22 nt, synthetic construct
  source 1..22: mol_type = other RNA
agtctctaacacagcccacttc

SEQ ID NO: 31278 - RNA, 22 nt, synthetic construct
  source 1..22: mol_type = other RNA
agtgagcgactgctccaccctg

SEQ ID NO: 31279 - RNA, 22 nt, synthetic construct
  source 1..22: mol_type = other RNA
agtggcaggcagggcagggtgg

SEQ ID NO: 31280 - RNA, 22 nt, synthetic construct
  source 1..22: mol_type = other RNA
agtgggaccagtgagcgactgc

SEQ ID NO: 31281 - RNA, 22 nt, synthetic construct
  source 1..22: mol_type = other RNA
agtgggctgtgttagagactgg

SEQ ID NO: 31282 - RNA, 22 nt, synthetic construct
  source 1..22: mol_type = other RNA
agtggggggctcagctgtgagg

SEQ ID NO: 31283 - RNA, 22 nt, synthetic construct
  source 1..22: mol_type = other RNA
atactgggaatctggtcggttt

SEQ ID NO: 31284 - RNA, 22 nt, synthetic construct
  source 1..22: mol_type = other RNA
atctggccggaggctggctcct

SEQ ID NO: 31285 - RNA, 22 nt, synthetic construct
  source 1..22: mol_type = other RNA
atctggtcggttttctccaggc

SEQ ID NO: 31286 - RNA, 22 nt, synthetic construct
  source 1..22: mol_type = other RNA
atgcgcctggagaaaaccgacc

SEQ ID NO: 31287 - RNA, 22 nt, synthetic construct
  source 1..22: mol_type = other RNA
atgttagggggcttggagagag

SEQ ID NO: 31288 - RNA, 22 nt, synthetic construct
  source 1..22: mol_type = other RNA
attcccagtatgttagggggct

SEQ ID NO: 31289 - RNA, 22 nt, synthetic construct
  source 1..22: mol_type = other RNA
caaccaggagccagcctccggc

SEQ ID NO: 31290 - RNA, 22 nt, synthetic construct
  source 1..22: mol_type = other RNA
caagagggagaaagcccactct

SEQ ID NO: 31291 - RNA, 22 nt, synthetic construct
  source 1..22: mol_type = other RNA
caagcacccagtctctaacaca

SEQ ID NO: 31292 - RNA, 22 nt, synthetic construct
  source 1..22: mol_type = other RNA
caagccccctaacatactggga

SEQ ID NO: 31293 - RNA, 22 nt, synthetic construct
  source 1..22: mol_type = other RNA
cacagcccacttcctcacagct

SEQ ID NO: 31294 - RNA, 22 nt, synthetic construct
  source 1..22: mol_type = other RNA
cacagctgagccccccactgtg

SEQ ID NO: 31295 - RNA, 22 nt, synthetic construct
  source 1..22: mol_type = other RNA
cacagtggggggctcagctgtg

SEQ ID NO: 31296 - RNA, 22 nt, synthetic construct
  source 1..22: mol_type = other RNA
caccacagtggggggctcagct

SEQ ID NO: 31297 - RNA, 22 nt, synthetic construct
  source 1..22: mol_type = other RNA
cacccagtctctaacacagccc

SEQ ID NO: 31298 - RNA, 22 nt, synthetic construct
  source 1..22: mol_type = other RNA
caccctgccctgcctgccactg

SEQ ID NO: 31299 - RNA, 22 nt, synthetic construct
  source 1..22: mol_type = other RNA
cactaggagactgccagtcacc

SEQ ID NO: 31300 - RNA, 22 nt, synthetic construct
  source 1..22: mol_type = other RNA
cactctctccaagccccctaac

SEQ ID NO: 31301 - RNA, 22 nt, synthetic construct
  source 1..22: mol_type = other RNA
cactgcctgcgctgttcaacca

SEQ ID NO: 31302 - RNA, 22 nt, synthetic construct
  source 1..22: mol_type = other RNA
cactggtcccactaggagactg

SEQ ID NO: 31303 - RNA, 22 nt, synthetic construct
  source 1..22: mol_type = other RNA
cactgtggtgactggcagtctc

SEQ ID NO: 31304 - RNA, 22 nt, synthetic construct
  source 1..22: mol_type = other RNA
cacttcctcacagctgagcccc

SEQ ID NO: 31305 - RNA, 22 nt, synthetic construct
  source 1..22: mol_type = other RNA
cagatgcgcctggagaaaaccg

SEQ ID NO: 31306 - RNA, 22 nt, synthetic construct
  source 1..22: mol_type = other RNA
cagattcccagtatgttagggg

SEQ ID NO: 31307 - RNA, 22 nt, synthetic construct
  source 1..22: mol_type = other RNA
cagcccacttcctcacagctga

SEQ ID NO: 31308 - RNA, 22 nt, synthetic construct
  source 1..22: mol_type = other RNA
cagcctccggccagatgcgcct

SEQ ID NO: 31309 - RNA, 22 nt, synthetic construct
  source 1..22: mol_type = other RNA
cagcgcaggcagtggcaggcag

SEQ ID NO: 31310 - RNA, 22 nt, synthetic construct
  source 1..22: mol_type = other RNA
cagctgagccccccactgtggt

SEQ ID NO: 31311 - RNA, 22 nt, synthetic construct
  source 1..22: mol_type = other RNA
cagctgtgaggaagtgggctgt

SEQ ID NO: 31312 - RNA, 22 nt, synthetic construct
  source 1..22: mol_type = other RNA
caggagccagcctccggccaga

SEQ ID NO: 31313 - RNA, 22 nt, synthetic construct
  source 1..22: mol_type = other RNA
caggcagggcagggtggagcag

SEQ ID NO: 31314 - RNA, 22 nt, synthetic construct
  source 1..22: mol_type = other RNA
caggcagtggcaggcagggcag

SEQ ID NO: 31315 - RNA, 22 nt, synthetic construct
  source 1..22: mol_type = other RNA
caggcgcatctggccggaggct

SEQ ID NO: 31316 - RNA, 22 nt, synthetic construct
  source 1..22: mol_type = other RNA
cagggcagggtggagcagtcgc

SEQ ID NO: 31317 - RNA, 22 nt, synthetic construct
  source 1..22: mol_type = other RNA
cagggtggagcagtcgctcact

SEQ ID NO: 31318 - RNA, 22 nt, synthetic construct
  source 1..22: mol_type = other RNA
cagtatgttagggggcttggag

SEQ ID NO: 31319 - RNA, 22 nt, synthetic construct
  source 1..22: mol_type = other RNA
cagtcaccacagtggggggctc

SEQ ID NO: 31320 - RNA, 22 nt, synthetic construct
  source 1..22: mol_type = other RNA
cagtcgctcactggtcccacta

SEQ ID NO: 31321 - RNA, 22 nt, synthetic construct
  source 1..22: mol_type = other RNA
cagtctcctagtgggaccagtg

SEQ ID NO: 31322 - RNA, 22 nt, synthetic construct
  source 1..22: mol_type = other RNA
cagtctctaacacagcccactt

SEQ ID NO: 31323 - RNA, 22 nt, synthetic construct
  source 1..22: mol_type = other RNA
cagtgagcgactgctccaccct

SEQ ID NO: 31324 - RNA, 22 nt, synthetic construct
  source 1..22: mol_type = other RNA
cagtggcaggcagggcagggtg

SEQ ID NO: 31325 - RNA, 22 nt, synthetic construct
  source 1..22: mol_type = other RNA
cagtggggggctcagctgtgag

SEQ ID NO: 31326 - RNA, 22 nt, synthetic construct
  source 1..22: mol_type = other RNA
catactgggaatctggtcggtt

SEQ ID NO: 31327 - RNA, 22 nt, synthetic construct
  source 1..22: mol_type = other RNA
catctggccggaggctggctcc

SEQ ID NO: 31328 - RNA, 22 nt, synthetic construct
  source 1..22: mol_type = other RNA
ccaagagggagaaagcccactc

SEQ ID NO: 31329 - RNA, 22 nt, synthetic construct
  source 1..22: mol_type = other RNA
ccaagcacccagtctctaacac

SEQ ID NO: 31330 - RNA, 22 nt, synthetic construct
  source 1..22: mol_type = other RNA
ccaagccccctaacatactggg

SEQ ID NO: 31331 - RNA, 22 nt, synthetic construct
  source 1..22: mol_type = other RNA
ccacagtggggggctcagctgt

SEQ ID NO: 31332 - RNA, 22 nt, synthetic construct
  source 1..22: mol_type = other RNA
ccaccctgccctgcctgccact

SEQ ID NO: 31333 - RNA, 22 nt, synthetic construct
  source 1..22: mol_type = other RNA
ccactaggagactgccagtcac

SEQ ID NO: 31334 - RNA, 22 nt, synthetic construct
  source 1..22: mol_type = other RNA
ccactctctccaagccccctaa

SEQ ID NO: 31335 - RNA, 22 nt, synthetic construct
  source 1..22: mol_type = other RNA
ccactgcctgcgctgttcaacc

SEQ ID NO: 31336 - RNA, 22 nt, synthetic construct
  source 1..22: mol_type = other RNA
ccactgtggtgactggcagtct

SEQ ID NO: 31337 - RNA, 22 nt, synthetic construct
  source 1..22: mol_type = other RNA
ccacttcctcacagctgagccc

SEQ ID NO: 31338 - RNA, 22 nt, synthetic construct
  source 1..22: mol_type = other RNA
ccagatgcgcctggagaaaacc

SEQ ID NO: 31339 - RNA, 22 nt, synthetic construct
  source 1..22: mol_type = other RNA
ccagattcccagtatgttaggg

SEQ ID NO: 31340 - RNA, 22 nt, synthetic construct
  source 1..22: mol_type = other RNA
ccagcctccggccagatgcgcc

SEQ ID NO: 31341 - RNA, 22 nt, synthetic construct
  source 1..22: mol_type = other RNA
ccaggagccagcctccggccag

SEQ ID NO: 31342 - RNA, 22 nt, synthetic construct
  source 1..22: mol_type = other RNA
ccaggcgcatctggccggaggc

SEQ ID NO: 31343 - RNA, 22 nt, synthetic construct
  source 1..22: mol_type = other RNA
ccagtatgttagggggcttgga

SEQ ID NO: 31344 - RNA, 22 nt, synthetic construct
  source 1..22: mol_type = other RNA
ccagtcaccacagtggggggct

SEQ ID NO: 31345 - RNA, 22 nt, synthetic construct
  source 1..22: mol_type = other RNA
ccagtctctaacacagcccact

SEQ ID NO: 31346 - RNA, 22 nt, synthetic construct
  source 1..22: mol_type = other RNA
ccagtgagcgactgctccaccc

SEQ ID NO: 31347 - RNA, 22 nt, synthetic construct
  source 1..22: mol_type = other RNA
cccaagagggagaaagcccact

SEQ ID NO: 31348 - RNA, 22 nt, synthetic construct
  source 1..22: mol_type = other RNA
cccactaggagactgccagtca

SEQ ID NO: 31349 - RNA, 22 nt, synthetic construct
  source 1..22: mol_type = other RNA
cccactctctccaagcccccta

SEQ ID NO: 31350 - RNA, 22 nt, synthetic construct
  source 1..22: mol_type = other RNA
cccactgtggtgactggcagtc

SEQ ID NO: 31351 - RNA, 22 nt, synthetic construct
  source 1..22: mol_type = other RNA
cccacttcctcacagctgagcc

SEQ ID NO: 31352 - RNA, 22 nt, synthetic construct
  source 1..22: mol_type = other RNA
cccagtatgttagggggcttgg

SEQ ID NO: 31353 - RNA, 22 nt, synthetic construct
  source 1..22: mol_type = other RNA
cccagtctctaacacagcccac

SEQ ID NO: 31354 - RNA, 22 nt, synthetic construct
  source 1..22: mol_type = other RNA
ccccactgtggtgactggcagt

SEQ ID NO: 31355 - RNA, 22 nt, synthetic construct
  source 1..22: mol_type = other RNA
cccccactgtggtgactggcag

SEQ ID NO: 31356 - RNA, 22 nt, synthetic construct
  source 1..22: mol_type = other RNA
ccccccactgtggtgactggca

SEQ ID NO: 31357 - RNA, 22 nt, synthetic construct
  source 1..22: mol_type = other RNA
ccccctaacatactgggaatct

SEQ ID NO: 31358 - RNA, 22 nt, synthetic construct
  source 1..22: mol_type = other RNA
cccctaacatactgggaatctg

SEQ ID NO: 31359 - RNA, 22 nt, synthetic construct
  source 1..22: mol_type = other RNA
cccctccaagcacccagtctct

SEQ ID NO: 31360 - RNA, 22 nt, synthetic construct
  source 1..22: mol_type = other RNA
ccctaacatactgggaatctgg

SEQ ID NO: 31361 - RNA, 22 nt, synthetic construct
  source 1..22: mol_type = other RNA
ccctccaagcacccagtctcta

SEQ ID NO: 31362 - RNA, 22 nt, synthetic construct
  source 1..22: mol_type = other RNA
ccctgccctgcctgccactgcc

SEQ ID NO: 31363 - RNA, 22 nt, synthetic construct
  source 1..22: mol_type = other RNA
ccctgcctgccactgcctgcgc

SEQ ID NO: 31364 - RNA, 22 nt, synthetic construct
  source 1..22: mol_type = other RNA
ccgaccagattcccagtatgtt

SEQ ID NO: 31365 - RNA, 22 nt, synthetic construct
  source 1..22: mol_type = other RNA
ccggaggctggctcctggttga

SEQ ID NO: 31366 - RNA, 22 nt, synthetic construct
  source 1..22: mol_type = other RNA
ccggccagatgcgcctggagaa

SEQ ID NO: 31367 - RNA, 22 nt, synthetic construct
  source 1..22: mol_type = other RNA
cctaacatactgggaatctggt

SEQ ID NO: 31368 - RNA, 22 nt, synthetic construct
  source 1..22: mol_type = other RNA
cctagtgggaccagtgagcgac

SEQ ID NO: 31369 - RNA, 22 nt, synthetic construct
  source 1..22: mol_type = other RNA
cctcacagctgagccccccact

SEQ ID NO: 31370 - RNA, 22 nt, synthetic construct
  source 1..22: mol_type = other RNA
cctccaagcacccagtctctaa

SEQ ID NO: 31371 - RNA, 22 nt, synthetic construct
  source 1..22: mol_type = other RNA
cctccggccagatgcgcctgga

SEQ ID NO: 31372 - RNA, 22 nt, synthetic construct
  source 1..22: mol_type = other RNA
cctgccactgcctgcgctgttc

SEQ ID NO: 31373 - RNA, 22 nt, synthetic construct
  source 1..22: mol_type = other RNA
cctgccctgcctgccactgcct

SEQ ID NO: 31374 - RNA, 22 nt, synthetic construct
  source 1..22: mol_type = other RNA
cctgcctgccactgcctgcgct

SEQ ID NO: 31375 - RNA, 22 nt, synthetic construct
  source 1..22: mol_type = other RNA
cctgcgctgttcaaccaggagc

SEQ ID NO: 31376 - RNA, 22 nt, synthetic construct
  source 1..22: mol_type = other RNA
cctggagaaaaccgaccagatt

SEQ ID NO: 31377 - RNA, 22 nt, synthetic construct
  source 1..22: mol_type = other RNA
cctggttgaacagcgcaggcag

SEQ ID NO: 31378 - RNA, 22 nt, synthetic construct
  source 1..22: mol_type = other RNA
cgaccagattcccagtatgtta

SEQ ID NO: 31379 - RNA, 22 nt, synthetic construct
  source 1..22: mol_type = other RNA
cgactgctccaccctgccctgc

SEQ ID NO: 31380 - RNA, 22 nt, synthetic construct
  source 1..22: mol_type = other RNA
cgcaggcagtggcaggcagggc

SEQ ID NO: 31381 - RNA, 22 nt, synthetic construct
  source 1..22: mol_type = other RNA
cgcatctggccggaggctggct

SEQ ID NO: 31382 - RNA, 22 nt, synthetic construct
  source 1..22: mol_type = other RNA
cgcctggagaaaaccgaccaga

SEQ ID NO: 31383 - RNA, 22 nt, synthetic construct
  source 1..22: mol_type = other RNA
cgctcactggtcccactaggag

SEQ ID NO: 31384 - RNA, 22 nt, synthetic construct
  source 1..22: mol_type = other RNA
cgctgttcaaccaggagccagc

SEQ ID NO: 31385 - RNA, 22 nt, synthetic construct
  source 1..22: mol_type = other RNA
cggaggctggctcctggttgaa

SEQ ID NO: 31386 - RNA, 22 nt, synthetic construct
  source 1..22: mol_type = other RNA
cggccagatgcgcctggagaaa

SEQ ID NO: 31387 - RNA, 22 nt, synthetic construct
  source 1..22: mol_type = other RNA
cggttttctccaggcgcatctg

SEQ ID NO: 31388 - RNA, 22 nt, synthetic construct
  source 1..22: mol_type = other RNA
ctaacacagcccacttcctcac

SEQ ID NO: 31389 - RNA, 22 nt, synthetic construct
  source 1..22: mol_type = other RNA
ctaacatactgggaatctggtc

SEQ ID NO: 31390 - RNA, 22 nt, synthetic construct
  source 1..22: mol_type = other RNA
ctaggagactgccagtcaccac

SEQ ID NO: 31391 - RNA, 22 nt, synthetic construct
  source 1..22: mol_type = other RNA
ctagtgggaccagtgagcgact

SEQ ID NO: 31392 - RNA, 22 nt, synthetic construct
  source 1..22: mol_type = other RNA
ctcacagctgagccccccactg

SEQ ID NO: 31393 - RNA, 22 nt, synthetic construct
  source 1..22: mol_type = other RNA
ctcactggtcccactaggagac

SEQ ID NO: 31394 - RNA, 22 nt, synthetic construct
  source 1..22: mol_type = other RNA
ctcagctgtgaggaagtgggct

SEQ ID NO: 31395 - RNA, 22 nt, synthetic construct
  source 1..22: mol_type = other RNA
ctccaagcacccagtctctaac

SEQ ID NO: 31396 - RNA, 22 nt, synthetic construct
  source 1..22: mol_type = other RNA
ctccaagccccctaacatactg

SEQ ID NO: 31397 - RNA, 22 nt, synthetic construct
  source 1..22: mol_type = other RNA
ctccaccctgccctgcctgcca

SEQ ID NO: 31398 - RNA, 22 nt, synthetic construct
  source 1..22: mol_type = other RNA
ctccaggcgcatctggccggag

SEQ ID NO: 31399 - RNA, 22 nt, synthetic construct
  source 1..22: mol_type = other RNA
ctccggccagatgcgcctggag

SEQ ID NO: 31400 - RNA, 22 nt, synthetic construct
  source 1..22: mol_type = other RNA
ctcctagtgggaccagtgagcg

SEQ ID NO: 31401 - RNA, 22 nt, synthetic construct
  source 1..22: mol_type = other RNA
ctcctggttgaacagcgcaggc

SEQ ID NO: 31402 - RNA, 22 nt, synthetic construct
  source 1..22: mol_type = other RNA
ctctaacacagcccacttcctc

SEQ ID NO: 31403 - RNA, 22 nt, synthetic construct
  source 1..22: mol_type = other RNA
ctctccaagccccctaacatac

SEQ ID NO: 31404 - RNA, 22 nt, synthetic construct
  source 1..22: mol_type = other RNA
ctctctccaagccccctaacat

SEQ ID NO: 31405 - RNA, 22 nt, synthetic construct
  source 1..22: mol_type = other RNA
ctgagccccccactgtggtgac

SEQ ID NO: 31406 - RNA, 22 nt, synthetic construct
  source 1..22: mol_type = other RNA
ctgccactgcctgcgctgttca

SEQ ID NO: 31407 - RNA, 22 nt, synthetic construct
  source 1..22: mol_type = other RNA
ctgccagtcaccacagtggggg

SEQ ID NO: 31408 - RNA, 22 nt, synthetic construct
  source 1..22: mol_type = other RNA
ctgccctgcctgccactgcctg

SEQ ID NO: 31409 - RNA, 22 nt, synthetic construct
  source 1..22: mol_type = other RNA
ctgcctgccactgcctgcgctg

SEQ ID NO: 31410 - RNA, 22 nt, synthetic construct
  source 1..22: mol_type = other RNA
ctgcctgcgctgttcaaccagg

SEQ ID NO: 31411 - RNA, 22 nt, synthetic construct
  source 1..22: mol_type = other RNA
ctgcgctgttcaaccaggagcc

SEQ ID NO: 31412 - RNA, 22 nt, synthetic construct
  source 1..22: mol_type = other RNA
ctgctccaccctgccctgcctg

SEQ ID NO: 31413 - RNA, 22 nt, synthetic construct
  source 1..22: mol_type = other RNA
ctggagaaaaccgaccagattc

SEQ ID NO: 31414 - RNA, 22 nt, synthetic construct
  source 1..22: mol_type = other RNA
ctggcagtctcctagtgggacc

SEQ ID NO: 31415 - RNA, 22 nt, synthetic construct
  source 1..22: mol_type = other RNA
ctggccggaggctggctcctgg

SEQ ID NO: 31416 - RNA, 22 nt, synthetic construct
  source 1..22: mol_type = other RNA
ctggctcctggttgaacagcgc

SEQ ID NO: 31417 - RNA, 22 nt, synthetic construct
  source 1..22: mol_type = other RNA
ctgggaatctggtcggttttct

SEQ ID NO: 31418 - RNA, 22 nt, synthetic construct
  source 1..22: mol_type = other RNA
ctggtcccactaggagactgcc

SEQ ID NO: 31419 - RNA, 22 nt, synthetic construct
  source 1..22: mol_type = other RNA
ctggtcggttttctccaggcgc

SEQ ID NO: 31420 - RNA, 22 nt, synthetic construct
  source 1..22: mol_type = other RNA
ctggttgaacagcgcaggcagt

SEQ ID NO: 31421 - RNA, 22 nt, synthetic construct
  source 1..22: mol_type = other RNA
ctgtgaggaagtgggctgtgtt

SEQ ID NO: 31422 - RNA, 22 nt, synthetic construct
  source 1..22: mol_type = other RNA
ctgtggtgactggcagtctcct

SEQ ID NO: 31423 - RNA, 22 nt, synthetic construct
  source 1..22: mol_type = other RNA
ctgtgttagagactgggtgctt

SEQ ID NO: 31424 - RNA, 22 nt, synthetic construct
  source 1..22: mol_type = other RNA
ctgttcaaccaggagccagcct

SEQ ID NO: 31425 - RNA, 22 nt, synthetic construct
  source 1..22: mol_type = other RNA
cttcctcacagctgagcccccc

SEQ ID NO: 31426 - RNA, 22 nt, synthetic construct
  source 1..22: mol_type = other RNA
cttggagagagtgggctttctc

SEQ ID NO: 31427 - RNA, 22 nt, synthetic construct
  source 1..22: mol_type = other RNA
gaaaaccgaccagattcccagt

SEQ ID NO: 31428 - RNA, 22 nt, synthetic construct
  source 1..22: mol_type = other RNA
gaaagcccactctctccaagcc

SEQ ID NO: 31429 - RNA, 22 nt, synthetic construct
  source 1..22: mol_type = other RNA
gaacagcgcaggcagtggcagg

SEQ ID NO: 31430 - RNA, 22 nt, synthetic construct
  source 1..22: mol_type = other RNA
gaagtgggctgtgttagagact

SEQ ID NO: 31431 - RNA, 22 nt, synthetic construct
  source 1..22: mol_type = other RNA
gaatctggtcggttttctccag

SEQ ID NO: 31432 - RNA, 22 nt, synthetic construct
  source 1..22: mol_type = other RNA
gaccagattcccagtatgttag

SEQ ID NO: 31433 - RNA, 22 nt, synthetic construct
  source 1..22: mol_type = other RNA
gaccagtgagcgactgctccac

SEQ ID NO: 31434 - RNA, 22 nt, synthetic construct
  source 1..22: mol_type = other RNA
gactgccagtcaccacagtggg

SEQ ID NO: 31435 - RNA, 22 nt, synthetic construct
  source 1..22: mol_type = other RNA
gactgctccaccctgccctgcc

SEQ ID NO: 31436 - RNA, 22 nt, synthetic construct
  source 1..22: mol_type = other RNA
gactggcagtctcctagtggga

SEQ ID NO: 31437 - RNA, 22 nt, synthetic construct
  source 1..22: mol_type = other RNA
gagaaaaccgaccagattccca

SEQ ID NO: 31438 - RNA, 22 nt, synthetic construct
  source 1..22: mol_type = other RNA
gagaaagcccactctctccaag

SEQ ID NO: 31439 - RNA, 22 nt, synthetic construct
  source 1..22: mol_type = other RNA
gagactgccagtcaccacagtg

SEQ ID NO: 31440 - RNA, 22 nt, synthetic construct
  source 1..22: mol_type = other RNA
gagcagtcgctcactggtccca

SEQ ID NO: 31441 - RNA, 22 nt, synthetic construct
  source 1..22: mol_type = other RNA
gagccagcctccggccagatgc

SEQ ID NO: 31442 - RNA, 22 nt, synthetic construct
  source 1..22: mol_type = other RNA
gagccccccactgtggtgactg

SEQ ID NO: 31443 - RNA, 22 nt, synthetic construct
  source 1..22: mol_type = other RNA
gagcgactgctccaccctgccc

SEQ ID NO: 31444 - RNA, 22 nt, synthetic construct
  source 1..22: mol_type = other RNA
gaggaagtgggctgtgttagag

SEQ ID NO: 31445 - RNA, 22 nt, synthetic construct
  source 1..22: mol_type = other RNA
gaggctggctcctggttgaaca

SEQ ID NO: 31446 - RNA, 22 nt, synthetic construct
  source 1..22: mol_type = other RNA
gagggagaaagcccactctctc

SEQ ID NO: 31447 - RNA, 22 nt, synthetic construct
  source 1..22: mol_type = other RNA
gatgcgcctggagaaaaccgac

SEQ ID NO: 31448 - RNA, 22 nt, synthetic construct
  source 1..22: mol_type = other RNA
gattcccagtatgttagggggc

SEQ ID NO: 31449 - RNA, 22 nt, synthetic construct
  source 1..22: mol_type = other RNA
gcacccagtctctaacacagcc

SEQ ID NO: 31450 - RNA, 22 nt, synthetic construct
  source 1..22: mol_type = other RNA
gcaggcagggcagggtggagca

SEQ ID NO: 31451 - RNA, 22 nt, synthetic construct
  source 1..22: mol_type = other RNA
gcaggcagtggcaggcagggca

SEQ ID NO: 31452 - RNA, 22 nt, synthetic construct
  source 1..22: mol_type = other RNA
gcagggcagggtggagcagtcg

SEQ ID NO: 31453 - RNA, 22 nt, synthetic construct
  source 1..22: mol_type = other RNA
gcagggtggagcagtcgctcac

SEQ ID NO: 31454 - RNA, 22 nt, synthetic construct
  source 1..22: mol_type = other RNA
gcagtcgctcactggtcccact

SEQ ID NO: 31455 - RNA, 22 nt, synthetic construct
  source 1..22: mol_type = other RNA
gcagtctcctagtgggaccagt

SEQ ID NO: 31456 - RNA, 22 nt, synthetic construct
  source 1..22: mol_type = other RNA
gcagtggcaggcagggcagggt

SEQ ID NO: 31457 - RNA, 22 nt, synthetic construct
  source 1..22: mol_type = other RNA
gcatctggccggaggctggctc

SEQ ID NO: 31458 - RNA, 22 nt, synthetic construct
  source 1..22: mol_type = other RNA
gccactgcctgcgctgttcaac

SEQ ID NO: 31459 - RNA, 22 nt, synthetic construct
  source 1..22: mol_type = other RNA
gccagatgcgcctggagaaaac

SEQ ID NO: 31460 - RNA, 22 nt, synthetic construct
  source 1..22: mol_type = other RNA
gccagcctccggccagatgcgc

SEQ ID NO: 31461 - RNA, 22 nt, synthetic construct
  source 1..22: mol_type = other RNA
gccagtcaccacagtggggggc

SEQ ID NO: 31462 - RNA, 22 nt, synthetic construct
  source 1..22: mol_type = other RNA
gcccactctctccaagccccct

SEQ ID NO: 31463 - RNA, 22 nt, synthetic construct
  source 1..22: mol_type = other RNA
gcccacttcctcacagctgagc

SEQ ID NO: 31464 - RNA, 22 nt, synthetic construct
  source 1..22: mol_type = other RNA
gccccccactgtggtgactggc

SEQ ID NO: 31465 - RNA, 22 nt, synthetic construct
  source 1..22: mol_type = other RNA
gccccctaacatactgggaatc

SEQ ID NO: 31466 - RNA, 22 nt, synthetic construct
  source 1..22: mol_type = other RNA
gcccctccaagcacccagtctc

SEQ ID NO: 31467 - RNA, 22 nt, synthetic construct
  source 1..22: mol_type = other RNA
gccctgcctgccactgcctgcg

SEQ ID NO: 31468 - RNA, 22 nt, synthetic construct
  source 1..22: mol_type = other RNA
gccggaggctggctcctggttg

SEQ ID NO: 31469 - RNA, 22 nt, synthetic construct
  source 1..22: mol_type = other RNA
gcctccggccagatgcgcctgg

SEQ ID NO: 31470 - RNA, 22 nt, synthetic construct
  source 1..22: mol_type = other RNA
gcctgccactgcctgcgctgtt

SEQ ID NO: 31471 - RNA, 22 nt, synthetic construct
  source 1..22: mol_type = other RNA
gcctgcgctgttcaaccaggag

SEQ ID NO: 31472 - RNA, 22 nt, synthetic construct
  source 1..22: mol_type = other RNA
gcctggagaaaaccgaccagat

SEQ ID NO: 31473 - RNA, 22 nt, synthetic construct
  source 1..22: mol_type = other RNA
gcgactgctccaccctgccctg

SEQ ID NO: 31474 - RNA, 22 nt, synthetic construct
  source 1..22: mol_type = other RNA
gcgcaggcagtggcaggcaggg

SEQ ID NO: 31475 - RNA, 22 nt, synthetic construct
  source 1..22: mol_type = other RNA
gcgcatctggccggaggctggc

SEQ ID NO: 31476 - RNA, 22 nt, synthetic construct
  source 1..22: mol_type = other RNA
gcgcctggagaaaaccgaccag

SEQ ID NO: 31477 - RNA, 22 nt, synthetic construct
  source 1..22: mol_type = other RNA
gcgctgttcaaccaggagccag

SEQ ID NO: 31478 - RNA, 22 nt, synthetic construct
  source 1..22: mol_type = other RNA
gctcactggtcccactaggaga

SEQ ID NO: 31479 - RNA, 22 nt, synthetic construct
  source 1..22: mol_type = other RNA
gctcagctgtgaggaagtgggc

SEQ ID NO: 31480 - RNA, 22 nt, synthetic construct
  source 1..22: mol_type = other RNA
gctccaccctgccctgcctgcc

SEQ ID NO: 31481 - RNA, 22 nt, synthetic construct
  source 1..22: mol_type = other RNA
gctcctggttgaacagcgcagg

SEQ ID NO: 31482 - RNA, 22 nt, synthetic construct
  source 1..22: mol_type = other RNA
gctgagccccccactgtggtga

SEQ ID NO: 31483 - RNA, 22 nt, synthetic construct
  source 1..22: mol_type = other RNA
gctggctcctggttgaacagcg

SEQ ID NO: 31484 - RNA, 22 nt, synthetic construct
  source 1..22: mol_type = other RNA
gctgtgaggaagtgggctgtgt

SEQ ID NO: 31485 - RNA, 22 nt, synthetic construct
  source 1..22: mol_type = other RNA
gctgtgttagagactgggtgct

SEQ ID NO: 31486 - RNA, 22 nt, synthetic construct
  source 1..22: mol_type = other RNA
gctgttcaaccaggagccagcc

SEQ ID NO: 31487 - RNA, 22 nt, synthetic construct
  source 1..22: mol_type = other RNA
gcttggagagagtgggctttct

SEQ ID NO: 31488 - RNA, 22 nt, synthetic construct
  source 1..22: mol_type = other RNA
ggaagtgggctgtgttagagac

SEQ ID NO: 31489 - RNA, 22 nt, synthetic construct
  source 1..22: mol_type = other RNA
ggaatctggtcggttttctcca

SEQ ID NO: 31490 - RNA, 22 nt, synthetic construct
  source 1..22: mol_type = other RNA
ggaccagtgagcgactgctcca

SEQ ID NO: 31491 - RNA, 22 nt, synthetic construct
  source 1..22: mol_type = other RNA
ggagaaaaccgaccagattccc

SEQ ID NO: 31492 - RNA, 22 nt, synthetic construct
  source 1..22: mol_type = other RNA
ggagaaagcccactctctccaa

SEQ ID NO: 31493 - RNA, 22 nt, synthetic construct
  source 1..22: mol_type = other RNA
ggagactgccagtcaccacagt

SEQ ID NO: 31494 - RNA, 22 nt, synthetic construct
  source 1..22: mol_type = other RNA
ggagcagtcgctcactggtccc

SEQ ID NO: 31495 - RNA, 22 nt, synthetic construct
  source 1..22: mol_type = other RNA
ggagccagcctccggccagatg

SEQ ID NO: 31496 - RNA, 22 nt, synthetic construct
  source 1..22: mol_type = other RNA
ggaggctggctcctggttgaac

SEQ ID NO: 31497 - RNA, 22 nt, synthetic construct
  source 1..22: mol_type = other RNA
ggcaggcagggcagggtggagc

SEQ ID NO: 31498 - RNA, 22 nt, synthetic construct
  source 1..22: mol_type = other RNA
ggcagggcagggtggagcagtc

SEQ ID NO: 31499 - RNA, 22 nt, synthetic construct
  source 1..22: mol_type = other RNA
ggcagggtggagcagtcgctca

SEQ ID NO: 31500 - RNA, 22 nt, synthetic construct
  source 1..22: mol_type = other RNA
ggcagtctcctagtgggaccag

SEQ ID NO: 31501 - RNA, 22 nt, synthetic construct
  source 1..22: mol_type = other RNA
ggcagtggcaggcagggcaggg

SEQ ID NO: 31502 - RNA, 22 nt, synthetic construct
  source 1..22: mol_type = other RNA
ggccagatgcgcctggagaaaa

SEQ ID NO: 31503 - RNA, 22 nt, synthetic construct
  source 1..22: mol_type = other RNA
ggcccctccaagcacccagtct

SEQ ID NO: 31504 - RNA, 22 nt, synthetic construct
  source 1..22: mol_type = other RNA
ggccggaggctggctcctggtt

SEQ ID NO: 31505 - RNA, 22 nt, synthetic construct
  source 1..22: mol_type = other RNA
ggcgcatctggccggaggctgg

SEQ ID NO: 31506 - RNA, 22 nt, synthetic construct
  source 1..22: mol_type = other RNA
ggctcagctgtgaggaagtggg

SEQ ID NO: 31507 - RNA, 22 nt, synthetic construct
  source 1..22: mol_type = other RNA
ggctcctggttgaacagcgcag

SEQ ID NO: 31508 - RNA, 22 nt, synthetic construct
  source 1..22: mol_type = other RNA
ggctggctcctggttgaacagc

SEQ ID NO: 31509 - RNA, 22 nt, synthetic construct
  source 1..22: mol_type = other RNA
ggctgtgttagagactgggtgc

SEQ ID NO: 31510 - RNA, 22 nt, synthetic construct
  source 1..22: mol_type = other RNA
ggcttggagagagtgggctttc

SEQ ID NO: 31511 - RNA, 22 nt, synthetic construct
  source 1..22: mol_type = other RNA
gggaatctggtcggttttctcc

SEQ ID NO: 31512 - RNA, 22 nt, synthetic construct
  source 1..22: mol_type = other RNA
gggaccagtgagcgactgctcc

SEQ ID NO: 31513 - RNA, 22 nt, synthetic construct
  source 1..22: mol_type = other RNA
gggagaaagcccactctctcca

SEQ ID NO: 31514 - RNA, 22 nt, synthetic construct
  source 1..22: mol_type = other RNA
gggcagggtggagcagtcgctc

SEQ ID NO: 31515 - RNA, 22 nt, synthetic construct
  source 1..22: mol_type = other RNA
gggctcagctgtgaggaagtgg

SEQ ID NO: 31516 - RNA, 22 nt, synthetic construct
  source 1..22: mol_type = other RNA
gggctgtgttagagactgggtg

SEQ ID NO: 31517 - RNA, 22 nt, synthetic construct
  source 1..22: mol_type = other RNA
gggcttggagagagtgggcttt

SEQ ID NO: 31518 - RNA, 22 nt, synthetic construct
  source 1..22: mol_type = other RNA
ggggctcagctgtgaggaagtg

SEQ ID NO: 31519 - RNA, 22 nt, synthetic construct
  source 1..22: mol_type = other RNA
ggggcttggagagagtgggctt

SEQ ID NO: 31520 - RNA, 22 nt, synthetic construct
  source 1..22: mol_type = other RNA
gggggctcagctgtgaggaagt

SEQ ID NO: 31521 - RNA, 22 nt, synthetic construct
  source 1..22: mol_type = other RNA
gggggcttggagagagtgggct

SEQ ID NO: 31522 - RNA, 22 nt, synthetic construct
  source 1..22: mol_type = other RNA
ggggggctcagctgtgaggaag

SEQ ID NO: 31523 - RNA, 22 nt, synthetic construct
  source 1..22: mol_type = other RNA
gggtggagcagtcgctcactgg

SEQ ID NO: 31524 - RNA, 22 nt, synthetic construct
  source 1..22: mol_type = other RNA
ggtcccactaggagactgccag

SEQ ID NO: 31525 - RNA, 22 nt, synthetic construct
  source 1..22: mol_type = other RNA
ggtcggttttctccaggcgcat

SEQ ID NO: 31526 - RNA, 22 nt, synthetic construct
  source 1..22: mol_type = other RNA
ggtgactggcagtctcctagtg

SEQ ID NO: 31527 - RNA, 22 nt, synthetic construct
  source 1..22: mol_type = other RNA
ggtggagcagtcgctcactggt

SEQ ID NO: 31528 - RNA, 22 nt, synthetic construct
  source 1..22: mol_type = other RNA
ggttgaacagcgcaggcagtgg

SEQ ID NO: 31529 - RNA, 22 nt, synthetic construct
  source 1..22: mol_type = other RNA
ggttttctccaggcgcatctgg

SEQ ID NO: 31530 - RNA, 22 nt, synthetic construct
  source 1..22: mol_type = other RNA
gtatgttagggggcttggagag

SEQ ID NO: 31531 - RNA, 22 nt, synthetic construct
  source 1..22: mol_type = other RNA
gtcaccacagtggggggctcag

SEQ ID NO: 31532 - RNA, 22 nt, synthetic construct
  source 1..22: mol_type = other RNA
gtcccactaggagactgccagt

SEQ ID NO: 31533 - RNA, 22 nt, synthetic construct
  source 1..22: mol_type = other RNA
gtcgctcactggtcccactagg

SEQ ID NO: 31534 - RNA, 22 nt, synthetic construct
  source 1..22: mol_type = other RNA
gtcggttttctccaggcgcatc

SEQ ID NO: 31535 - RNA, 22 nt, synthetic construct
  source 1..22: mol_type = other RNA
gtctcctagtgggaccagtgag

SEQ ID NO: 31536 - RNA, 22 nt, synthetic construct
  source 1..22: mol_type = other RNA
gtctctaacacagcccacttcc

SEQ ID NO: 31537 - RNA, 22 nt, synthetic construct
  source 1..22: mol_type = other RNA
gtgactggcagtctcctagtgg

SEQ ID NO: 31538 - RNA, 22 nt, synthetic construct
  source 1..22: mol_type = other RNA
gtgagcgactgctccaccctgc

SEQ ID NO: 31539 - RNA, 22 nt, synthetic construct
  source 1..22: mol_type = other RNA
gtgaggaagtgggctgtgttag

SEQ ID NO: 31540 - RNA, 22 nt, synthetic construct
  source 1..22: mol_type = other RNA
gtggagcagtcgctcactggtc

SEQ ID NO: 31541 - RNA, 22 nt, synthetic construct
  source 1..22: mol_type = other RNA
gtggcaggcagggcagggtgga

SEQ ID NO: 31542 - RNA, 22 nt, synthetic construct
  source 1..22: mol_type = other RNA
gtgggaccagtgagcgactgct

SEQ ID NO: 31543 - RNA, 22 nt, synthetic construct
  source 1..22: mol_type = other RNA
gtgggctgtgttagagactggg

SEQ ID NO: 31544 - RNA, 22 nt, synthetic construct
  source 1..22: mol_type = other RNA
gtggggggctcagctgtgagga

SEQ ID NO: 31545 - RNA, 22 nt, synthetic construct
  source 1..22: mol_type = other RNA
gtggtgactggcagtctcctag

SEQ ID NO: 31546 - RNA, 22 nt, synthetic construct
  source 1..22: mol_type = other RNA
gttagggggcttggagagagtg

SEQ ID NO: 31547 - RNA, 22 nt, synthetic construct
  source 1..22: mol_type = other RNA
gttcaaccaggagccagcctcc

SEQ ID NO: 31548 - RNA, 22 nt, synthetic construct
  source 1..22: mol_type = other RNA
gttgaacagcgcaggcagtggc

SEQ ID NO: 31549 - RNA, 22 nt, synthetic construct
  source 1..22: mol_type = other RNA
gttttctccaggcgcatctggc

SEQ ID NO: 31550 - RNA, 22 nt, synthetic construct
  source 1..22: mol_type = other RNA
taacacagcccacttcctcaca

SEQ ID NO: 31551 - RNA, 22 nt, synthetic construct
  source 1..22: mol_type = other RNA
taacatactgggaatctggtcg

SEQ ID NO: 31552 - RNA, 22 nt, synthetic construct
  source 1..22: mol_type = other RNA
tactgggaatctggtcggtttt

SEQ ID NO: 31553 - RNA, 22 nt, synthetic construct
  source 1..22: mol_type = other RNA
taggagactgccagtcaccaca

SEQ ID NO: 31554 - RNA, 22 nt, synthetic construct
  source 1..22: mol_type = other RNA
tagggggcttggagagagtggg

SEQ ID NO: 31555 - RNA, 22 nt, synthetic construct
  source 1..22: mol_type = other RNA
tagtgggaccagtgagcgactg

SEQ ID NO: 31556 - RNA, 22 nt, synthetic construct
  source 1..22: mol_type = other RNA
tatgttagggggcttggagaga

SEQ ID NO: 31557 - RNA, 22 nt, synthetic construct
  source 1..22: mol_type = other RNA
tcaaccaggagccagcctccgg

SEQ ID NO: 31558 - RNA, 22 nt, synthetic construct
  source 1..22: mol_type = other RNA
tcacagctgagccccccactgt

SEQ ID NO: 31559 - RNA, 22 nt, synthetic construct
  source 1..22: mol_type = other RNA
tcaccacagtggggggctcagc

SEQ ID NO: 31560 - RNA, 22 nt, synthetic construct
  source 1..22: mol_type = other RNA
tcactggtcccactaggagact

SEQ ID NO: 31561 - RNA, 22 nt, synthetic construct
  source 1..22: mol_type = other RNA
tcagctgtgaggaagtgggctg

SEQ ID NO: 31562 - RNA, 22 nt, synthetic construct
  source 1..22: mol_type = other RNA
tccaagcacccagtctctaaca

SEQ ID NO: 31563 - RNA, 22 nt, synthetic construct
  source 1..22: mol_type = other RNA
tccaagccccctaacatactgg

SEQ ID NO: 31564 - RNA, 22 nt, synthetic construct
  source 1..22: mol_type = other RNA
tccaccctgccctgcctgccac

SEQ ID NO: 31565 - RNA, 22 nt, synthetic construct
  source 1..22: mol_type = other RNA
tccaggcgcatctggccggagg

SEQ ID NO: 31566 - RNA, 22 nt, synthetic construct
  source 1..22: mol_type = other RNA
tcccaagagggagaaagcccac

SEQ ID NO: 31567 - RNA, 22 nt, synthetic construct
  source 1..22: mol_type = other RNA
tcccactaggagactgccagtc

SEQ ID NO: 31568 - RNA, 22 nt, synthetic construct
  source 1..22: mol_type = other RNA
tcccagtatgttagggggcttg

SEQ ID NO: 31569 - RNA, 22 nt, synthetic construct
  source 1..22: mol_type = other RNA
tccggccagatgcgcctggaga

SEQ ID NO: 31570 - RNA, 22 nt, synthetic construct
  source 1..22: mol_type = other RNA
tcctagtgggaccagtgagcga

SEQ ID NO: 31571 - RNA, 22 nt, synthetic construct
  source 1..22: mol_type = other RNA
tcctcacagctgagccccccac

SEQ ID NO: 31572 - RNA, 22 nt, synthetic construct
  source 1..22: mol_type = other RNA
tcctggttgaacagcgcaggca

SEQ ID NO: 31573 - RNA, 22 nt, synthetic construct
  source 1..22: mol_type = other RNA
tcgctcactggtcccactagga

SEQ ID NO: 31574 - RNA, 22 nt, synthetic construct
  source 1..22: mol_type = other RNA
tcggttttctccaggcgcatct

SEQ ID NO: 31575 - RNA, 22 nt, synthetic construct
  source 1..22: mol_type = other RNA
tctaacacagcccacttcctca

SEQ ID NO: 31576 - RNA, 22 nt, synthetic construct
  source 1..22: mol_type = other RNA
tctccaagccccctaacatact

SEQ ID NO: 31577 - RNA, 22 nt, synthetic construct
  source 1..22: mol_type = other RNA
tctccaggcgcatctggccgga

SEQ ID NO: 31578 - RNA, 22 nt, synthetic construct
  source 1..22: mol_type = other RNA
tctcctagtgggaccagtgagc

SEQ ID NO: 31579 - RNA, 22 nt, synthetic construct
  source 1..22: mol_type = other RNA
tctctaacacagcccacttcct

SEQ ID NO: 31580 - RNA, 22 nt, synthetic construct
  source 1..22: mol_type = other RNA
tctctccaagccccctaacata

SEQ ID NO: 31581 - RNA, 22 nt, synthetic construct
  source 1..22: mol_type = other RNA
tctggccggaggctggctcctg

SEQ ID NO: 31582 - RNA, 22 nt, synthetic construct
  source 1..22: mol_type = other RNA
tctggtcggttttctccaggcg

SEQ ID NO: 31583 - RNA, 22 nt, synthetic construct
  source 1..22: mol_type = other RNA
tgaacagcgcaggcagtggcag

SEQ ID NO: 31584 - RNA, 22 nt, synthetic construct
  source 1..22: mol_type = other RNA
tgactggcagtctcctagtggg

SEQ ID NO: 31585 - RNA, 22 nt, synthetic construct
  source 1..22: mol_type = other RNA
tgagccccccactgtggtgact

SEQ ID NO: 31586 - RNA, 22 nt, synthetic construct
  source 1..22: mol_type = other RNA
tgagcgactgctccaccctgcc

SEQ ID NO: 31587 - RNA, 22 nt, synthetic construct
  source 1..22: mol_type = other RNA
tgaggaagtgggctgtgttaga

SEQ ID NO: 31588 - RNA, 22 nt, synthetic construct
  source 1..22: mol_type = other RNA
tgccactgcctgcgctgttcaa

SEQ ID NO: 31589 - RNA, 22 nt, synthetic construct
  source 1..22: mol_type = other RNA
tgccagtcaccacagtgggggg

SEQ ID NO: 31590 - RNA, 22 nt, synthetic construct
  source 1..22: mol_type = other RNA
tgccctgcctgccactgcctgc

SEQ ID NO: 31591 - RNA, 22 nt, synthetic construct
  source 1..22: mol_type = other RNA
tgcctgccactgcctgcgctgt

SEQ ID NO: 31592 - RNA, 22 nt, synthetic construct
  source 1..22: mol_type = other RNA
tgcctgcgctgttcaaccagga

SEQ ID NO: 31593 - RNA, 22 nt, synthetic construct
  source 1..22: mol_type = other RNA
tgcgcctggagaaaaccgacca

SEQ ID NO: 31594 - RNA, 22 nt, synthetic construct
  source 1..22: mol_type = other RNA
tgcgctgttcaaccaggagcca

SEQ ID NO: 31595 - RNA, 22 nt, synthetic construct
  source 1..22: mol_type = other RNA
tgctccaccctgccctgcctgc

SEQ ID NO: 31596 - RNA, 22 nt, synthetic construct
  source 1..22: mol_type = other RNA
tggagaaaaccgaccagattcc

SEQ ID NO: 31597 - RNA, 22 nt, synthetic construct
  source 1..22: mol_type = other RNA
tggagagagtgggctttctccc

SEQ ID NO: 31598 - RNA, 22 nt, synthetic construct
  source 1..22: mol_type = other RNA
tggagcagtcgctcactggtcc

SEQ ID NO: 31599 - RNA, 22 nt, synthetic construct
  source 1..22: mol_type = other RNA
tggcaggcagggcagggtggag

SEQ ID NO: 31600 - RNA, 22 nt, synthetic construct
  source 1..22: mol_type = other RNA
tggcagtctcctagtgggacca

SEQ ID NO: 31601 - RNA, 22 nt, synthetic construct
  source 1..22: mol_type = other RNA
tggccggaggctggctcctggt

SEQ ID NO: 31602 - RNA, 22 nt, synthetic construct
  source 1..22: mol_type = other RNA
tggctcctggttgaacagcgca

SEQ ID NO: 31603 - RNA, 22 nt, synthetic construct
  source 1..22: mol_type = other RNA
tgggaatctggtcggttttctc

SEQ ID NO: 31604 - RNA, 22 nt, synthetic construct
  source 1..22: mol_type = other RNA
tgggaccagtgagcgactgctc

SEQ ID NO: 31605 - RNA, 22 nt, synthetic construct
  source 1..22: mol_type = other RNA
tgggctgtgttagagactgggt

SEQ ID NO: 31606 - RNA, 22 nt, synthetic construct
  source 1..22: mol_type = other RNA
tggggggctcagctgtgaggaa

SEQ ID NO: 31607 - RNA, 22 nt, synthetic construct
  source 1..22: mol_type = other RNA
tggtcccactaggagactgcca

SEQ ID NO: 31608 - RNA, 22 nt, synthetic construct
  source 1..22: mol_type = other RNA
tggtcggttttctccaggcgca

SEQ ID NO: 31609 - RNA, 22 nt, synthetic construct
  source 1..22: mol_type = other RNA
tggtgactggcagtctcctagt

SEQ ID NO: 31610 - RNA, 22 nt, synthetic construct
  source 1..22: mol_type = other RNA
tggttgaacagcgcaggcagtg

SEQ ID NO: 31611 - RNA, 22 nt, synthetic construct
  source 1..22: mol_type = other RNA
tgtgaggaagtgggctgtgtta

SEQ ID NO: 31612 - RNA, 22 nt, synthetic construct
  source 1..22: mol_type = other RNA
tgtggtgactggcagtctccta

SEQ ID NO: 31613 - RNA, 22 nt, synthetic construct
  source 1..22: mol_type = other RNA
tgtgttagagactgggtgcttg

SEQ ID NO: 31614 - RNA, 22 nt, synthetic construct
  source 1..22: mol_type = other RNA
tgttagggggcttggagagagt

SEQ ID NO: 31615 - RNA, 22 nt, synthetic construct
  source 1..22: mol_type = other RNA
tgttcaaccaggagccagcctc

SEQ ID NO: 31616 - RNA, 22 nt, synthetic construct
  source 1..22: mol_type = other RNA
ttagggggcttggagagagtgg

SEQ ID NO: 31617 - RNA, 22 nt, synthetic construct
  source 1..22: mol_type = other RNA
ttcaaccaggagccagcctccg

SEQ ID NO: 31618 - RNA, 22 nt, synthetic construct
  source 1..22: mol_type = other RNA
ttcccagtatgttagggggctt

SEQ ID NO: 31619 - RNA, 22 nt, synthetic construct
  source 1..22: mol_type = other RNA
ttcctcacagctgagcccccca

SEQ ID NO: 31620 - RNA, 22 nt, synthetic construct
  source 1..22: mol_type = other RNA
ttctccaggcgcatctggccgg

SEQ ID NO: 31621 - RNA, 22 nt, synthetic construct
  source 1..22: mol_type = other RNA
ttgaacagcgcaggcagtggca

SEQ ID NO: 31622 - RNA, 22 nt, synthetic construct
  source 1..22: mol_type = other RNA
ttggagagagtgggctttctcc

SEQ ID NO: 31623 - RNA, 22 nt, synthetic construct
  source 1..22: mol_type = other RNA
tttctccaggcgcatctggccg

SEQ ID NO: 31624 - RNA, 22 nt, synthetic construct
  source 1..22: mol_type = other RNA
ttttctccaggcgcatctggcc

SEQ ID NO: 31625 - RNA, 20 nt, synthetic construct
  source 1..20: mol_type = other RNA
aaactggatgggtccctcag

SEQ ID NO: 31626 - RNA, 20 nt, synthetic construct
  source 1..20: mol_type = other RNA
aaaggcactgcaagagacaa

SEQ ID NO: 31627 - RNA, 20 nt, synthetic construct
  source 1..20: mol_type = other RNA
aaaggcagtgaggtgggatc

SEQ ID NO: 31628 - RNA, 20 nt, synthetic construct
  source 1..20: mol_type = other RNA
aaatctctgaggctggaaca

SEQ ID NO: 31629 - RNA, 20 nt, synthetic construct
  source 1..20: mol_type = other RNA
aacaggggtctccagtatat

SEQ ID NO: 31630 - RNA, 20 nt, synthetic construct
  source 1..20: mol_type = other RNA
aacgaggaactggagaaagg

SEQ ID NO: 31631 - RNA, 20 nt, synthetic construct
  source 1..20: mol_type = other RNA
aactggagaaaggcactgca

SEQ ID NO: 31632 - RNA, 20 nt, synthetic construct
  source 1..20: mol_type = other RNA
aactggatgggtccctcagg

SEQ ID NO: 31633 - RNA, 20 nt, synthetic construct
  source 1..20: mol_type = other RNA
aagagacaaaggcagtgagg

SEQ ID NO: 31634 - RNA, 20 nt, synthetic construct
  source 1..20: mol_type = other RNA
aagatcccacctcactgcct

SEQ ID NO: 31635 - RNA, 20 nt, synthetic construct
  source 1..20: mol_type = other RNA
aaggcactgcaagagacaaa

SEQ ID NO: 31636 - RNA, 20 nt, synthetic construct
  source 1..20: mol_type = other RNA
aaggcagtgaggtgggatct

SEQ ID NO: 31637 - RNA, 20 nt, synthetic construct
  source 1..20: mol_type = other RNA
aatatactggagacccctgt

SEQ ID NO: 31638 - RNA, 20 nt, synthetic construct
  source 1..20: mol_type = other RNA
aatctccctgagggacccat

SEQ ID NO: 31639 - RNA, 20 nt, synthetic construct
  source 1..20: mol_type = other RNA
aatctctgaggctggaacag

SEQ ID NO: 31640 - RNA, 20 nt, synthetic construct
  source 1..20: mol_type = other RNA
acaaactggatgggtccctc

SEQ ID NO: 31641 - RNA, 20 nt, synthetic construct
  source 1..20: mol_type = other RNA
acaaaggcagtgaggtggga

SEQ ID NO: 31642 - RNA, 20 nt, synthetic construct
  source 1..20: mol_type = other RNA
acaggggtctccagtatatt

SEQ ID NO: 31643 - RNA, 20 nt, synthetic construct
  source 1..20: mol_type = other RNA
acaggtgctatgcaagatcc

SEQ ID NO: 31644 - RNA, 20 nt, synthetic construct
  source 1..20: mol_type = other RNA
accatctccactctgcccca

SEQ ID NO: 31645 - RNA, 20 nt, synthetic construct
  source 1..20: mol_type = other RNA
accatggtagatgaatatac

SEQ ID NO: 31646 - RNA, 20 nt, synthetic construct
  source 1..20: mol_type = other RNA
accatggtgagtgcggggcc

SEQ ID NO: 31647 - RNA, 20 nt, synthetic construct
  source 1..20: mol_type = other RNA
acccatccagtttgtcccca

SEQ ID NO: 31648 - RNA, 20 nt, synthetic construct
  source 1..20: mol_type = other RNA
acccctgttccagcctcaga

SEQ ID NO: 31649 - RNA, 20 nt, synthetic construct
  source 1..20: mol_type = other RNA
acctcactgcctttgtctct

SEQ ID NO: 31650 - RNA, 20 nt, synthetic construct
  source 1..20: mol_type = other RNA
acgaggaactggagaaaggc

SEQ ID NO: 31651 - RNA, 20 nt, synthetic construct
  source 1..20: mol_type = other RNA
actcaccatggtagatgaat

SEQ ID NO: 31652 - RNA, 20 nt, synthetic construct
  source 1..20: mol_type = other RNA
actctgccccatgggctctg

SEQ ID NO: 31653 - RNA, 20 nt, synthetic construct
  source 1..20: mol_type = other RNA
actgcaagagacaaaggcag

SEQ ID NO: 31654 - RNA, 20 nt, synthetic construct
  source 1..20: mol_type = other RNA
actgcctttgtctcttgcag

SEQ ID NO: 31655 - RNA, 20 nt, synthetic construct
  source 1..20: mol_type = other RNA
actggagaaaggcactgcaa

SEQ ID NO: 31656 - RNA, 20 nt, synthetic construct
  source 1..20: mol_type = other RNA
actggagacccctgttccag

SEQ ID NO: 31657 - RNA, 20 nt, synthetic construct
  source 1..20: mol_type = other RNA
actggatgggtccctcaggg

SEQ ID NO: 31658 - RNA, 20 nt, synthetic construct
  source 1..20: mol_type = other RNA
agaaaggcactgcaagagac

SEQ ID NO: 31659 - RNA, 20 nt, synthetic construct
  source 1..20: mol_type = other RNA
agacaaaggcagtgaggtgg

SEQ ID NO: 31660 - RNA, 20 nt, synthetic construct
  source 1..20: mol_type = other RNA
agacccctgttccagcctca

SEQ ID NO: 31661 - RNA, 20 nt, synthetic construct
  source 1..20: mol_type = other RNA
agagacaaaggcagtgaggt

SEQ ID NO: 31662 - RNA, 20 nt, synthetic construct
  source 1..20: mol_type = other RNA
agagatttgccagagcccat

SEQ ID NO: 31663 - RNA, 20 nt, synthetic construct
  source 1..20: mol_type = other RNA
agagcccatggggcagagtg

SEQ ID NO: 31664 - RNA, 20 nt, synthetic construct
  source 1..20: mol_type = other RNA
agaggtggtcggggagccag

SEQ ID NO: 31665 - RNA, 20 nt, synthetic construct
  source 1..20: mol_type = other RNA
agagtggagatggtggggac

SEQ ID NO: 31666 - RNA, 20 nt, synthetic construct
  source 1..20: mol_type = other RNA
agatcccacctcactgcctt

SEQ ID NO: 31667 - RNA, 20 nt, synthetic construct
  source 1..20: mol_type = other RNA
agatgaatatactggagacc

SEQ ID NO: 31668 - RNA, 20 nt, synthetic construct
  source 1..20: mol_type = other RNA
agatggtggggacaaactgg

SEQ ID NO: 31669 - RNA, 20 nt, synthetic construct
  source 1..20: mol_type = other RNA
agattcaggcagctcaacga

SEQ ID NO: 31670 - RNA, 20 nt, synthetic construct
  source 1..20: mol_type = other RNA
agatttgccagagcccatgg

SEQ ID NO: 31671 - RNA, 20 nt, synthetic construct
  source 1..20: mol_type = other RNA
agccaggccccgcactcacc

SEQ ID NO: 31672 - RNA, 20 nt, synthetic construct
  source 1..20: mol_type = other RNA
agcccatggggcagagtgga

SEQ ID NO: 31673 - RNA, 20 nt, synthetic construct
  source 1..20: mol_type = other RNA
agcctcagagatttgccaga

SEQ ID NO: 31674 - RNA, 20 nt, synthetic construct
  source 1..20: mol_type = other RNA
agctcaacgaggaactggag

SEQ ID NO: 31675 - RNA, 20 nt, synthetic construct
  source 1..20: mol_type = other RNA
agctgcctgaatctccctga

SEQ ID NO: 31676 - RNA, 20 nt, synthetic construct
  source 1..20: mol_type = other RNA
aggaactggagaaaggcact

SEQ ID NO: 31677 - RNA, 20 nt, synthetic construct
  source 1..20: mol_type = other RNA
aggagggagaggtggtcggg

SEQ ID NO: 31678 - RNA, 20 nt, synthetic construct
  source 1..20: mol_type = other RNA
aggcactgcaagagacaaag

SEQ ID NO: 31679 - RNA, 20 nt, synthetic construct
  source 1..20: mol_type = other RNA
aggcagctcaacgaggaact

SEQ ID NO: 31680 - RNA, 20 nt, synthetic construct
  source 1..20: mol_type = other RNA
aggcagtgaggtgggatctt

SEQ ID NO: 31681 - RNA, 20 nt, synthetic construct
  source 1..20: mol_type = other RNA
aggccccgcactcaccatgg

SEQ ID NO: 31682 - RNA, 20 nt, synthetic construct
  source 1..20: mol_type = other RNA
aggctggaacaggggtctcc

SEQ ID NO: 31683 - RNA, 20 nt, synthetic construct
  source 1..20: mol_type = other RNA
agggacccatccagtttgtc

SEQ ID NO: 31684 - RNA, 20 nt, synthetic construct
  source 1..20: mol_type = other RNA
agggagaggtggtcggggag

SEQ ID NO: 31685 - RNA, 20 nt, synthetic construct
  source 1..20: mol_type = other RNA
agggagattcaggcagctca

SEQ ID NO: 31686 - RNA, 20 nt, synthetic construct
  source 1..20: mol_type = other RNA
aggggtctccagtatattca

SEQ ID NO: 31687 - RNA, 20 nt, synthetic construct
  source 1..20: mol_type = other RNA
aggtaggagggagaggtggt

SEQ ID NO: 31688 - RNA, 20 nt, synthetic construct
  source 1..20: mol_type = other RNA
aggtgctatgcaagatccca

SEQ ID NO: 31689 - RNA, 20 nt, synthetic construct
  source 1..20: mol_type = other RNA
aggtggtcggggagccaggc

SEQ ID NO: 31690 - RNA, 20 nt, synthetic construct
  source 1..20: mol_type = other RNA
agtatattcatctaccatgg

SEQ ID NO: 31691 - RNA, 20 nt, synthetic construct
  source 1..20: mol_type = other RNA
agtgaggtgggatcttgcat

SEQ ID NO: 31692 - RNA, 20 nt, synthetic construct
  source 1..20: mol_type = other RNA
agtgcctttctccagttcct

SEQ ID NO: 31693 - RNA, 20 nt, synthetic construct
  source 1..20: mol_type = other RNA
agtgcggggcctggctcccc

SEQ ID NO: 31694 - RNA, 20 nt, synthetic construct
  source 1..20: mol_type = other RNA
agtggagatggtggggacaa

SEQ ID NO: 31695 - RNA, 20 nt, synthetic construct
  source 1..20: mol_type = other RNA
agttcctcgttgagctgcct

SEQ ID NO: 31696 - RNA, 20 nt, synthetic construct
  source 1..20: mol_type = other RNA
agtttgtccccaccatctcc

SEQ ID NO: 31697 - RNA, 20 nt, synthetic construct
  source 1..20: mol_type = other RNA
atactggagacccctgttcc

SEQ ID NO: 31698 - RNA, 20 nt, synthetic construct
  source 1..20: mol_type = other RNA
atatactggagacccctgtt

SEQ ID NO: 31699 - RNA, 20 nt, synthetic construct
  source 1..20: mol_type = other RNA
atattcatctaccatggtga

SEQ ID NO: 31700 - RNA, 20 nt, synthetic construct
  source 1..20: mol_type = other RNA
atccagtttgtccccaccat

SEQ ID NO: 31701 - RNA, 20 nt, synthetic construct
  source 1..20: mol_type = other RNA
atcccacctcactgcctttg

SEQ ID NO: 31702 - RNA, 20 nt, synthetic construct
  source 1..20: mol_type = other RNA
atctaccatggtgagtgcgg

SEQ ID NO: 31703 - RNA, 20 nt, synthetic construct
  source 1..20: mol_type = other RNA
atctccactctgccccatgg

SEQ ID NO: 31704 - RNA, 20 nt, synthetic construct
  source 1..20: mol_type = other RNA
atctccctgagggacccatc

SEQ ID NO: 31705 - RNA, 20 nt, synthetic construct
  source 1..20: mol_type = other RNA
atctctgaggctggaacagg

SEQ ID NO: 31706 - RNA, 20 nt, synthetic construct
  source 1..20: mol_type = other RNA
atgaatatactggagacccc

SEQ ID NO: 31707 - RNA, 20 nt, synthetic construct
  source 1..20: mol_type = other RNA
atgcaagatcccacctcact

SEQ ID NO: 31708 - RNA, 20 nt, synthetic construct
  source 1..20: mol_type = other RNA
atgggctctggcaaatctct

SEQ ID NO: 31709 - RNA, 20 nt, synthetic construct
  source 1..20: mol_type = other RNA
atggggcagagtggagatgg

SEQ ID NO: 31710 - RNA, 20 nt, synthetic construct
  source 1..20: mol_type = other RNA
atgggtccctcagggagatt

SEQ ID NO: 31711 - RNA, 20 nt, synthetic construct
  source 1..20: mol_type = other RNA
atggtagatgaatatactgg

SEQ ID NO: 31712 - RNA, 20 nt, synthetic construct
  source 1..20: mol_type = other RNA
atggtgagtgcggggcctgg

SEQ ID NO: 31713 - RNA, 20 nt, synthetic construct
  source 1..20: mol_type = other RNA
atggtggggacaaactggat

SEQ ID NO: 31714 - RNA, 20 nt, synthetic construct
  source 1..20: mol_type = other RNA
attcaggcagctcaacgagg

SEQ ID NO: 31715 - RNA, 20 nt, synthetic construct
  source 1..20: mol_type = other RNA
attcatctaccatggtgagt

SEQ ID NO: 31716 - RNA, 20 nt, synthetic construct
  source 1..20: mol_type = other RNA
atttgccagagcccatgggg

SEQ ID NO: 31717 - RNA, 20 nt, synthetic construct
  source 1..20: mol_type = other RNA
caaactggatgggtccctca

SEQ ID NO: 31718 - RNA, 20 nt, synthetic construct
  source 1..20: mol_type = other RNA
caaaggcagtgaggtgggat

SEQ ID NO: 31719 - RNA, 20 nt, synthetic construct
  source 1..20: mol_type = other RNA
caaatctctgaggctggaac

SEQ ID NO: 31720 - RNA, 20 nt, synthetic construct
  source 1..20: mol_type = other RNA
caacgaggaactggagaaag

SEQ ID NO: 31721 - RNA, 20 nt, synthetic construct
  source 1..20: mol_type = other RNA
caagagacaaaggcagtgag

SEQ ID NO: 31722 - RNA, 20 nt, synthetic construct
  source 1..20: mol_type = other RNA
caagatcccacctcactgcc

SEQ ID NO: 31723 - RNA, 20 nt, synthetic construct
  source 1..20: mol_type = other RNA
caccatctccactctgcccc

SEQ ID NO: 31724 - RNA, 20 nt, synthetic construct
  source 1..20: mol_type = other RNA
caccatggtagatgaatata

SEQ ID NO: 31725 - RNA, 20 nt, synthetic construct
  source 1..20: mol_type = other RNA
cacctcactgcctttgtctc

SEQ ID NO: 31726 - RNA, 20 nt, synthetic construct
  source 1..20: mol_type = other RNA
cactcaccatggtagatgaa

SEQ ID NO: 31727 - RNA, 20 nt, synthetic construct
  source 1..20: mol_type = other RNA
cactctgccccatgggctct

SEQ ID NO: 31728 - RNA, 20 nt, synthetic construct
  source 1..20: mol_type = other RNA
cactgcaagagacaaaggca

SEQ ID NO: 31729 - RNA, 20 nt, synthetic construct
  source 1..20: mol_type = other RNA
cactgcctttgtctcttgca

SEQ ID NO: 31730 - RNA, 20 nt, synthetic construct
  source 1..20: mol_type = other RNA
cagagatttgccagagccca

SEQ ID NO: 31731 - RNA, 20 nt, synthetic construct
  source 1..20: mol_type = other RNA
cagagcccatggggcagagt

SEQ ID NO: 31732 - RNA, 20 nt, synthetic construct
  source 1..20: mol_type = other RNA
cagagtggagatggtgggga

SEQ ID NO: 31733 - RNA, 20 nt, synthetic construct
  source 1..20: mol_type = other RNA
cagcctcagagatttgccag

SEQ ID NO: 31734 - RNA, 20 nt, synthetic construct
  source 1..20: mol_type = other RNA
cagctcaacgaggaactgga

SEQ ID NO: 31735 - RNA, 20 nt, synthetic construct
  source 1..20: mol_type = other RNA
caggcagctcaacgaggaac

SEQ ID NO: 31736 - RNA, 20 nt, synthetic construct
  source 1..20: mol_type = other RNA
caggccccgcactcaccatg

SEQ ID NO: 31737 - RNA, 20 nt, synthetic construct
  source 1..20: mol_type = other RNA
cagggagattcaggcagctc

SEQ ID NO: 31738 - RNA, 20 nt, synthetic construct
  source 1..20: mol_type = other RNA
caggggtctccagtatattc

SEQ ID NO: 31739 - RNA, 20 nt, synthetic construct
  source 1..20: mol_type = other RNA
caggtaggagggagaggtgg

SEQ ID NO: 31740 - RNA, 20 nt, synthetic construct
  source 1..20: mol_type = other RNA
caggtgctatgcaagatccc

SEQ ID NO: 31741 - RNA, 20 nt, synthetic construct
  source 1..20: mol_type = other RNA
cagtatattcatctaccatg

SEQ ID NO: 31742 - RNA, 20 nt, synthetic construct
  source 1..20: mol_type = other RNA
cagtgaggtgggatcttgca

SEQ ID NO: 31743 - RNA, 20 nt, synthetic construct
  source 1..20: mol_type = other RNA
cagtgcctttctccagttcc

SEQ ID NO: 31744 - RNA, 20 nt, synthetic construct
  source 1..20: mol_type = other RNA
cagttcctcgttgagctgcc

SEQ ID NO: 31745 - RNA, 20 nt, synthetic construct
  source 1..20: mol_type = other RNA
cagtttgtccccaccatctc

SEQ ID NO: 31746 - RNA, 20 nt, synthetic construct
  source 1..20: mol_type = other RNA
catccagtttgtccccacca

SEQ ID NO: 31747 - RNA, 20 nt, synthetic construct
  source 1..20: mol_type = other RNA
catctaccatggtgagtgcg

SEQ ID NO: 31748 - RNA, 20 nt, synthetic construct
  source 1..20: mol_type = other RNA
catctccactctgccccatg

SEQ ID NO: 31749 - RNA, 20 nt, synthetic construct
  source 1..20: mol_type = other RNA
catgggctctggcaaatctc

SEQ ID NO: 31750 - RNA, 20 nt, synthetic construct
  source 1..20: mol_type = other RNA
catggggcagagtggagatg

SEQ ID NO: 31751 - RNA, 20 nt, synthetic construct
  source 1..20: mol_type = other RNA
catggtagatgaatatactg

SEQ ID NO: 31752 - RNA, 20 nt, synthetic construct
  source 1..20: mol_type = other RNA
catggtgagtgcggggcctg

SEQ ID NO: 31753 - RNA, 20 nt, synthetic construct
  source 1..20: mol_type = other RNA
ccaccatctccactctgccc

SEQ ID NO: 31754 - RNA, 20 nt, synthetic construct
  source 1..20: mol_type = other RNA
ccacctcactgcctttgtct

SEQ ID NO: 31755 - RNA, 20 nt, synthetic construct
  source 1..20: mol_type = other RNA
ccactctgccccatgggctc

SEQ ID NO: 31756 - RNA, 20 nt, synthetic construct
  source 1..20: mol_type = other RNA
ccagagcccatggggcagag

SEQ ID NO: 31757 - RNA, 20 nt, synthetic construct
  source 1..20: mol_type = other RNA
ccagcctcagagatttgcca

SEQ ID NO: 31758 - RNA, 20 nt, synthetic construct
  source 1..20: mol_type = other RNA
ccaggccccgcactcaccat

SEQ ID NO: 31759 - RNA, 20 nt, synthetic construct
  source 1..20: mol_type = other RNA
ccagtatattcatctaccat

SEQ ID NO: 31760 - RNA, 20 nt, synthetic construct
  source 1..20: mol_type = other RNA
ccagttcctcgttgagctgc

SEQ ID NO: 31761 - RNA, 20 nt, synthetic construct
  source 1..20: mol_type = other RNA
ccagtttgtccccaccatct

SEQ ID NO: 31762 - RNA, 20 nt, synthetic construct
  source 1..20: mol_type = other RNA
ccatccagtttgtccccacc

SEQ ID NO: 31763 - RNA, 20 nt, synthetic construct
  source 1..20: mol_type = other RNA
ccatctccactctgccccat

SEQ ID NO: 31764 - RNA, 20 nt, synthetic construct
  source 1..20: mol_type = other RNA
ccatgggctctggcaaatct

SEQ ID NO: 31765 - RNA, 20 nt, synthetic construct
  source 1..20: mol_type = other RNA
ccatggggcagagtggagat

SEQ ID NO: 31766 - RNA, 20 nt, synthetic construct
  source 1..20: mol_type = other RNA
ccatggtagatgaatatact

SEQ ID NO: 31767 - RNA, 20 nt, synthetic construct
  source 1..20: mol_type = other RNA
ccatggtgagtgcggggcct

SEQ ID NO: 31768 - RNA, 20 nt, synthetic construct
  source 1..20: mol_type = other RNA
cccaccatctccactctgcc

SEQ ID NO: 31769 - RNA, 20 nt, synthetic construct
  source 1..20: mol_type = other RNA
cccacctcactgcctttgtc

SEQ ID NO: 31770 - RNA, 20 nt, synthetic construct
  source 1..20: mol_type = other RNA
cccatccagtttgtccccac

SEQ ID NO: 31771 - RNA, 20 nt, synthetic construct
  source 1..20: mol_type = other RNA
cccatgggctctggcaaatc

SEQ ID NO: 31772 - RNA, 20 nt, synthetic construct
  source 1..20: mol_type = other RNA
cccatggggcagagtggaga

SEQ ID NO: 31773 - RNA, 20 nt, synthetic construct
  source 1..20: mol_type = other RNA
ccccaccatctccactctgc

SEQ ID NO: 31774 - RNA, 20 nt, synthetic construct
  source 1..20: mol_type = other RNA
ccccatgggctctggcaaat

SEQ ID NO: 31775 - RNA, 20 nt, synthetic construct
  source 1..20: mol_type = other RNA
ccccgcactcaccatggtag

SEQ ID NO: 31776 - RNA, 20 nt, synthetic construct
  source 1..20: mol_type = other RNA
cccctgttccagcctcagag

SEQ ID NO: 31777 - RNA, 20 nt, synthetic construct
  source 1..20: mol_type = other RNA
cccgcactcaccatggtaga

SEQ ID NO: 31778 - RNA, 20 nt, synthetic construct
  source 1..20: mol_type = other RNA
ccctcagggagattcaggca

SEQ ID NO: 31779 - RNA, 20 nt, synthetic construct
  source 1..20: mol_type = other RNA
ccctgagggacccatccagt

SEQ ID NO: 31780 - RNA, 20 nt, synthetic construct
  source 1..20: mol_type = other RNA
ccctgttccagcctcagaga

SEQ ID NO: 31781 - RNA, 20 nt, synthetic construct
  source 1..20: mol_type = other RNA
ccgcactcaccatggtagat

SEQ ID NO: 31782 - RNA, 20 nt, synthetic construct
  source 1..20: mol_type = other RNA
cctcactgcctttgtctctt

SEQ ID NO: 31783 - RNA, 20 nt, synthetic construct
  source 1..20: mol_type = other RNA
cctcagagatttgccagagc

SEQ ID NO: 31784 - RNA, 20 nt, synthetic construct
  source 1..20: mol_type = other RNA
cctcagggagattcaggcag

SEQ ID NO: 31785 - RNA, 20 nt, synthetic construct
  source 1..20: mol_type = other RNA
cctcgttgagctgcctgaat

SEQ ID NO: 31786 - RNA, 20 nt, synthetic construct
  source 1..20: mol_type = other RNA
cctgaatctccctgagggac

SEQ ID NO: 31787 - RNA, 20 nt, synthetic construct
  source 1..20: mol_type = other RNA
cctgagggacccatccagtt

SEQ ID NO: 31788 - RNA, 20 nt, synthetic construct
  source 1..20: mol_type = other RNA
cctggctccccgaccacctc

SEQ ID NO: 31789 - RNA, 20 nt, synthetic construct
  source 1..20: mol_type = other RNA
cctgttccagcctcagagat

SEQ ID NO: 31790 - RNA, 20 nt, synthetic construct
  source 1..20: mol_type = other RNA
cctttctccagttcctcgtt

SEQ ID NO: 31791 - RNA, 20 nt, synthetic construct
  source 1..20: mol_type = other RNA
cctttgtctcttgcagtgcc

SEQ ID NO: 31792 - RNA, 20 nt, synthetic construct
  source 1..20: mol_type = other RNA
cgaggaactggagaaaggca

SEQ ID NO: 31793 - RNA, 20 nt, synthetic construct
  source 1..20: mol_type = other RNA
cgcactcaccatggtagatg

SEQ ID NO: 31794 - RNA, 20 nt, synthetic construct
  source 1..20: mol_type = other RNA
cgttgagctgcctgaatctc

SEQ ID NO: 31795 - RNA, 20 nt, synthetic construct
  source 1..20: mol_type = other RNA
ctaccatggtgagtgcgggg

SEQ ID NO: 31796 - RNA, 20 nt, synthetic construct
  source 1..20: mol_type = other RNA
ctatgcaagatcccacctca

SEQ ID NO: 31797 - RNA, 20 nt, synthetic construct
  source 1..20: mol_type = other RNA
ctcaacgaggaactggagaa

SEQ ID NO: 31798 - RNA, 20 nt, synthetic construct
  source 1..20: mol_type = other RNA
ctcaccatggtagatgaata

SEQ ID NO: 31799 - RNA, 20 nt, synthetic construct
  source 1..20: mol_type = other RNA
ctcactgcctttgtctcttg

SEQ ID NO: 31800 - RNA, 20 nt, synthetic construct
  source 1..20: mol_type = other RNA
ctcagagatttgccagagcc

SEQ ID NO: 31801 - RNA, 20 nt, synthetic construct
  source 1..20: mol_type = other RNA
ctcagggagattcaggcagc

SEQ ID NO: 31802 - RNA, 20 nt, synthetic construct
  source 1..20: mol_type = other RNA
ctccactctgccccatgggc

SEQ ID NO: 31803 - RNA, 20 nt, synthetic construct
  source 1..20: mol_type = other RNA
ctccagtatattcatctacc

SEQ ID NO: 31804 - RNA, 20 nt, synthetic construct
  source 1..20: mol_type = other RNA
ctccagttcctcgttgagct

SEQ ID NO: 31805 - RNA, 20 nt, synthetic construct
  source 1..20: mol_type = other RNA
ctccccgaccacctctccct

SEQ ID NO: 31806 - RNA, 20 nt, synthetic construct
  source 1..20: mol_type = other RNA
ctccctgagggacccatcca

SEQ ID NO: 31807 - RNA, 20 nt, synthetic construct
  source 1..20: mol_type = other RNA
ctcgttgagctgcctgaatc

SEQ ID NO: 31808 - RNA, 20 nt, synthetic construct
  source 1..20: mol_type = other RNA
ctctgaggctggaacagggg

SEQ ID NO: 31809 - RNA, 20 nt, synthetic construct
  source 1..20: mol_type = other RNA
ctctgccccatgggctctgg

SEQ ID NO: 31810 - RNA, 20 nt, synthetic construct
  source 1..20: mol_type = other RNA
ctctggcaaatctctgaggc

SEQ ID NO: 31811 - RNA, 20 nt, synthetic construct
  source 1..20: mol_type = other RNA
ctcttgcagtgcctttctcc

SEQ ID NO: 31812 - RNA, 20 nt, synthetic construct
  source 1..20: mol_type = other RNA
ctgaatctccctgagggacc

SEQ ID NO: 31813 - RNA, 20 nt, synthetic construct
  source 1..20: mol_type = other RNA
ctgaggctggaacaggggtc

SEQ ID NO: 31814 - RNA, 20 nt, synthetic construct
  source 1..20: mol_type = other RNA
ctgagggacccatccagttt

SEQ ID NO: 31815 - RNA, 20 nt, synthetic construct
  source 1..20: mol_type = other RNA
ctgcaagagacaaaggcagt

SEQ ID NO: 31816 - RNA, 20 nt, synthetic construct
  source 1..20: mol_type = other RNA
ctgccccatgggctctggca

SEQ ID NO: 31817 - RNA, 20 nt, synthetic construct
  source 1..20: mol_type = other RNA
ctgcctgaatctccctgagg

SEQ ID NO: 31818 - RNA, 20 nt, synthetic construct
  source 1..20: mol_type = other RNA
ctgcctttgtctcttgcagt

SEQ ID NO: 31819 - RNA, 20 nt, synthetic construct
  source 1..20: mol_type = other RNA
ctggaacaggggtctccagt

SEQ ID NO: 31820 - RNA, 20 nt, synthetic construct
  source 1..20: mol_type = other RNA
ctggagaaaggcactgcaag

SEQ ID NO: 31821 - RNA, 20 nt, synthetic construct
  source 1..20: mol_type = other RNA
ctggagacccctgttccagc

SEQ ID NO: 31822 - RNA, 20 nt, synthetic construct
  source 1..20: mol_type = other RNA
ctggatgggtccctcaggga

SEQ ID NO: 31823 - RNA, 20 nt, synthetic construct
  source 1..20: mol_type = other RNA
ctggcaaatctctgaggctg

SEQ ID NO: 31824 - RNA, 20 nt, synthetic construct
  source 1..20: mol_type = other RNA
ctggctccccgaccacctct

SEQ ID NO: 31825 - RNA, 20 nt, synthetic construct
  source 1..20: mol_type = other RNA
ctgttccagcctcagagatt

SEQ ID NO: 31826 - RNA, 20 nt, synthetic construct
  source 1..20: mol_type = other RNA
cttgcagtgcctttctccag

SEQ ID NO: 31827 - RNA, 20 nt, synthetic construct
  source 1..20: mol_type = other RNA
ctttctccagttcctcgttg

SEQ ID NO: 31828 - RNA, 20 nt, synthetic construct
  source 1..20: mol_type = other RNA
ctttgtctcttgcagtgcct

SEQ ID NO: 31829 - RNA, 20 nt, synthetic construct
  source 1..20: mol_type = other RNA
gaaaggcactgcaagagaca

SEQ ID NO: 31830 - RNA, 20 nt, synthetic construct
  source 1..20: mol_type = other RNA
gaacaggggtctccagtata

SEQ ID NO: 31831 - RNA, 20 nt, synthetic construct
  source 1..20: mol_type = other RNA
gaactggagaaaggcactgc

SEQ ID NO: 31832 - RNA, 20 nt, synthetic construct
  source 1..20: mol_type = other RNA
gaatatactggagacccctg

SEQ ID NO: 31833 - RNA, 20 nt, synthetic construct
  source 1..20: mol_type = other RNA
gaatctccctgagggaccca

SEQ ID NO: 31834 - RNA, 20 nt, synthetic construct
  source 1..20: mol_type = other RNA
gacaaactggatgggtccct

SEQ ID NO: 31835 - RNA, 20 nt, synthetic construct
  source 1..20: mol_type = other RNA
gacaaaggcagtgaggtggg

SEQ ID NO: 31836 - RNA, 20 nt, synthetic construct
  source 1..20: mol_type = other RNA
gacccatccagtttgtcccc

SEQ ID NO: 31837 - RNA, 20 nt, synthetic construct
  source 1..20: mol_type = other RNA
gacccctgttccagcctcag

SEQ ID NO: 31838 - RNA, 20 nt, synthetic construct
  source 1..20: mol_type = other RNA
gagaaaggcactgcaagaga

SEQ ID NO: 31839 - RNA, 20 nt, synthetic construct
  source 1..20: mol_type = other RNA
gagacaaaggcagtgaggtg

SEQ ID NO: 31840 - RNA, 20 nt, synthetic construct
  source 1..20: mol_type = other RNA
gagacccctgttccagcctc

SEQ ID NO: 31841 - RNA, 20 nt, synthetic construct
  source 1..20: mol_type = other RNA
gagaggtggtcggggagcca

SEQ ID NO: 31842 - RNA, 20 nt, synthetic construct
  source 1..20: mol_type = other RNA
gagatggtggggacaaactg

SEQ ID NO: 31843 - RNA, 20 nt, synthetic construct
  source 1..20: mol_type = other RNA
gagattcaggcagctcaacg

SEQ ID NO: 31844 - RNA, 20 nt, synthetic construct
  source 1..20: mol_type = other RNA
gagatttgccagagcccatg

SEQ ID NO: 31845 - RNA, 20 nt, synthetic construct
  source 1..20: mol_type = other RNA
gagccaggccccgcactcac

SEQ ID NO: 31846 - RNA, 20 nt, synthetic construct
  source 1..20: mol_type = other RNA
gagcccatggggcagagtgg

SEQ ID NO: 31847 - RNA, 20 nt, synthetic construct
  source 1..20: mol_type = other RNA
gagctgcctgaatctccctg

SEQ ID NO: 31848 - RNA, 20 nt, synthetic construct
  source 1..20: mol_type = other RNA
gaggaactggagaaaggcac

SEQ ID NO: 31849 - RNA, 20 nt, synthetic construct
  source 1..20: mol_type = other RNA
gaggctggaacaggggtctc

SEQ ID NO: 31850 - RNA, 20 nt, synthetic construct
  source 1..20: mol_type = other RNA
gagggacccatccagtttgt

SEQ ID NO: 31851 - RNA, 20 nt, synthetic construct
  source 1..20: mol_type = other RNA
gagggagaggtggtcgggga

SEQ ID NO: 31852 - RNA, 20 nt, synthetic construct
  source 1..20: mol_type = other RNA
gaggtggtcggggagccagg

SEQ ID NO: 31853 - RNA, 20 nt, synthetic construct
  source 1..20: mol_type = other RNA
gagtgcggggcctggctccc

SEQ ID NO: 31854 - RNA, 20 nt, synthetic construct
  source 1..20: mol_type = other RNA
gagtggagatggtggggaca

SEQ ID NO: 31855 - RNA, 20 nt, synthetic construct
  source 1..20: mol_type = other RNA
gatcccacctcactgccttt

SEQ ID NO: 31856 - RNA, 20 nt, synthetic construct
  source 1..20: mol_type = other RNA
gatgaatatactggagaccc

SEQ ID NO: 31857 - RNA, 20 nt, synthetic construct
  source 1..20: mol_type = other RNA
gatgggtccctcagggagat

SEQ ID NO: 31858 - RNA, 20 nt, synthetic construct
  source 1..20: mol_type = other RNA
gatggtggggacaaactgga

SEQ ID NO: 31859 - RNA, 20 nt, synthetic construct
  source 1..20: mol_type = other RNA
gattcaggcagctcaacgag

SEQ ID NO: 31860 - RNA, 20 nt, synthetic construct
  source 1..20: mol_type = other RNA
gatttgccagagcccatggg

SEQ ID NO: 31861 - RNA, 20 nt, synthetic construct
  source 1..20: mol_type = other RNA
gcaaatctctgaggctggaa

SEQ ID NO: 31862 - RNA, 20 nt, synthetic construct
  source 1..20: mol_type = other RNA
gcaagagacaaaggcagtga

SEQ ID NO: 31863 - RNA, 20 nt, synthetic construct
  source 1..20: mol_type = other RNA
gcaagatcccacctcactgc

SEQ ID NO: 31864 - RNA, 20 nt, synthetic construct
  source 1..20: mol_type = other RNA
gcactcaccatggtagatga

SEQ ID NO: 31865 - RNA, 20 nt, synthetic construct
  source 1..20: mol_type = other RNA
gcactgcaagagacaaaggc

SEQ ID NO: 31866 - RNA, 20 nt, synthetic construct
  source 1..20: mol_type = other RNA
gcagagtggagatggtgggg

SEQ ID NO: 31867 - RNA, 20 nt, synthetic construct
  source 1..20: mol_type = other RNA
gcagctcaacgaggaactgg

SEQ ID NO: 31868 - RNA, 20 nt, synthetic construct
  source 1..20: mol_type = other RNA
gcagtgaggtgggatcttgc

SEQ ID NO: 31869 - RNA, 20 nt, synthetic construct
  source 1..20: mol_type = other RNA
gcagtgcctttctccagttc

SEQ ID NO: 31870 - RNA, 20 nt, synthetic construct
  source 1..20: mol_type = other RNA
gccagagcccatggggcaga

SEQ ID NO: 31871 - RNA, 20 nt, synthetic construct
  source 1..20: mol_type = other RNA
gccaggccccgcactcacca

SEQ ID NO: 31872 - RNA, 20 nt, synthetic construct
  source 1..20: mol_type = other RNA
gcccatggggcagagtggag

SEQ ID NO: 31873 - RNA, 20 nt, synthetic construct
  source 1..20: mol_type = other RNA
gccccatgggctctggcaaa

SEQ ID NO: 31874 - RNA, 20 nt, synthetic construct
  source 1..20: mol_type = other RNA
gccccgcactcaccatggta

SEQ ID NO: 31875 - RNA, 20 nt, synthetic construct
  source 1..20: mol_type = other RNA
gcctcagagatttgccagag

SEQ ID NO: 31876 - RNA, 20 nt, synthetic construct
  source 1..20: mol_type = other RNA
gcctgaatctccctgaggga

SEQ ID NO: 31877 - RNA, 20 nt, synthetic construct
  source 1..20: mol_type = other RNA
gcctggctccccgaccacct

SEQ ID NO: 31878 - RNA, 20 nt, synthetic construct
  source 1..20: mol_type = other RNA
gcctttctccagttcctcgt

SEQ ID NO: 31879 - RNA, 20 nt, synthetic construct
  source 1..20: mol_type = other RNA
gcctttgtctcttgcagtgc

SEQ ID NO: 31880 - RNA, 20 nt, synthetic construct
  source 1..20: mol_type = other RNA
gctatgcaagatcccacctc

SEQ ID NO: 31881 - RNA, 20 nt, synthetic construct
  source 1..20: mol_type = other RNA
gctcaacgaggaactggaga

SEQ ID NO: 31882 - RNA, 20 nt, synthetic construct
  source 1..20: mol_type = other RNA
gctccccgaccacctctccc

SEQ ID NO: 31883 - RNA, 20 nt, synthetic construct
  source 1..20: mol_type = other RNA
gctctggcaaatctctgagg

SEQ ID NO: 31884 - RNA, 20 nt, synthetic construct
  source 1..20: mol_type = other RNA
gctgcctgaatctccctgag

SEQ ID NO: 31885 - RNA, 20 nt, synthetic construct
  source 1..20: mol_type = other RNA
gctggaacaggggtctccag

SEQ ID NO: 31886 - RNA, 20 nt, synthetic construct
  source 1..20: mol_type = other RNA
ggaacaggggtctccagtat

SEQ ID NO: 31887 - RNA, 20 nt, synthetic construct
  source 1..20: mol_type = other RNA
ggaactggagaaaggcactg

SEQ ID NO: 31888 - RNA, 20 nt, synthetic construct
  source 1..20: mol_type = other RNA
ggacaaactggatgggtccc

SEQ ID NO: 31889 - RNA, 20 nt, synthetic construct
  source 1..20: mol_type = other RNA
ggacccatccagtttgtccc

SEQ ID NO: 31890 - RNA, 20 nt, synthetic construct
  source 1..20: mol_type = other RNA
ggagaaaggcactgcaagag

SEQ ID NO: 31891 - RNA, 20 nt, synthetic construct
  source 1..20: mol_type = other RNA
ggagacccctgttccagcct

SEQ ID NO: 31892 - RNA, 20 nt, synthetic construct
  source 1..20: mol_type = other RNA
ggagaggtggtcggggagcc

SEQ ID NO: 31893 - RNA, 20 nt, synthetic construct
  source 1..20: mol_type = other RNA
ggagatggtggggacaaact

SEQ ID NO: 31894 - RNA, 20 nt, synthetic construct
  source 1..20: mol_type = other RNA
ggagattcaggcagctcaac

SEQ ID NO: 31895 - RNA, 20 nt, synthetic construct
  source 1..20: mol_type = other RNA
ggagccaggccccgcactca

SEQ ID NO: 31896 - RNA, 20 nt, synthetic construct
  source 1..20: mol_type = other RNA
ggagggagaggtggtcgggg

SEQ ID NO: 31897 - RNA, 20 nt, synthetic construct
  source 1..20: mol_type = other RNA
ggatgggtccctcagggaga

SEQ ID NO: 31898 - RNA, 20 nt, synthetic construct
  source 1..20: mol_type = other RNA
ggcaaatctctgaggctgga

SEQ ID NO: 31899 - RNA, 20 nt, synthetic construct
  source 1..20: mol_type = other RNA
ggcactgcaagagacaaagg

SEQ ID NO: 31900 - RNA, 20 nt, synthetic construct
  source 1..20: mol_type = other RNA
ggcagagtggagatggtggg

SEQ ID NO: 31901 - RNA, 20 nt, synthetic construct
  source 1..20: mol_type = other RNA
ggcagctcaacgaggaactg

SEQ ID NO: 31902 - RNA, 20 nt, synthetic construct
  source 1..20: mol_type = other RNA
ggcagtgaggtgggatcttg

SEQ ID NO: 31903 - RNA, 20 nt, synthetic construct
  source 1..20: mol_type = other RNA
ggccccgcactcaccatggt

SEQ ID NO: 31904 - RNA, 20 nt, synthetic construct
  source 1..20: mol_type = other RNA
ggcctggctccccgaccacc

SEQ ID NO: 31905 - RNA, 20 nt, synthetic construct
  source 1..20: mol_type = other RNA
ggctccccgaccacctctcc

SEQ ID NO: 31906 - RNA, 20 nt, synthetic construct
  source 1..20: mol_type = other RNA
ggctctggcaaatctctgag

SEQ ID NO: 31907 - RNA, 20 nt, synthetic construct
  source 1..20: mol_type = other RNA
ggctggaacaggggtctcca

SEQ ID NO: 31908 - RNA, 20 nt, synthetic construct
  source 1..20: mol_type = other RNA
gggacaaactggatgggtcc

SEQ ID NO: 31909 - RNA, 20 nt, synthetic construct
  source 1..20: mol_type = other RNA
gggacccatccagtttgtcc

SEQ ID NO: 31910 - RNA, 20 nt, synthetic construct
  source 1..20: mol_type = other RNA
gggagaggtggtcggggagc

SEQ ID NO: 31911 - RNA, 20 nt, synthetic construct
  source 1..20: mol_type = other RNA
gggagattcaggcagctcaa

SEQ ID NO: 31912 - RNA, 20 nt, synthetic construct
  source 1..20: mol_type = other RNA
gggagccaggccccgcactc

SEQ ID NO: 31913 - RNA, 20 nt, synthetic construct
  source 1..20: mol_type = other RNA
gggcagagtggagatggtgg

SEQ ID NO: 31914 - RNA, 20 nt, synthetic construct
  source 1..20: mol_type = other RNA
gggcctggctccccgaccac

SEQ ID NO: 31915 - RNA, 20 nt, synthetic construct
  source 1..20: mol_type = other RNA
gggctctggcaaatctctga

SEQ ID NO: 31916 - RNA, 20 nt, synthetic construct
  source 1..20: mol_type = other RNA
ggggacaaactggatgggtc

SEQ ID NO: 31917 - RNA, 20 nt, synthetic construct
  source 1..20: mol_type = other RNA
ggggagccaggccccgcact

SEQ ID NO: 31918 - RNA, 20 nt, synthetic construct
  source 1..20: mol_type = other RNA
ggggcagagtggagatggtg

SEQ ID NO: 31919 - RNA, 20 nt, synthetic construct
  source 1..20: mol_type = other RNA
ggggcctggctccccgacca

SEQ ID NO: 31920 - RNA, 20 nt, synthetic construct
  source 1..20: mol_type = other RNA
ggggtctccagtatattcat

SEQ ID NO: 31921 - RNA, 20 nt, synthetic construct
  source 1..20: mol_type = other RNA
gggtccctcagggagattca

SEQ ID NO: 31922 - RNA, 20 nt, synthetic construct
  source 1..20: mol_type = other RNA
gggtctccagtatattcatc

SEQ ID NO: 31923 - RNA, 20 nt, synthetic construct
  source 1..20: mol_type = other RNA
ggtagatgaatatactggag

SEQ ID NO: 31924 - RNA, 20 nt, synthetic construct
  source 1..20: mol_type = other RNA
ggtaggagggagaggtggtc

SEQ ID NO: 31925 - RNA, 20 nt, synthetic construct
  source 1..20: mol_type = other RNA
ggtccctcagggagattcag

SEQ ID NO: 31926 - RNA, 20 nt, synthetic construct
  source 1..20: mol_type = other RNA
ggtctccagtatattcatct

SEQ ID NO: 31927 - RNA, 20 nt, synthetic construct
  source 1..20: mol_type = other RNA
ggtgagtgcggggcctggct

SEQ ID NO: 31928 - RNA, 20 nt, synthetic construct
  source 1..20: mol_type = other RNA
ggtgctatgcaagatcccac

SEQ ID NO: 31929 - RNA, 20 nt, synthetic construct
  source 1..20: mol_type = other RNA
ggtggggacaaactggatgg

SEQ ID NO: 31930 - RNA, 20 nt, synthetic construct
  source 1..20: mol_type = other RNA
ggtggtcggggagccaggcc

SEQ ID NO: 31931 - RNA, 20 nt, synthetic construct
  source 1..20: mol_type = other RNA
gtagatgaatatactggaga

SEQ ID NO: 31932 - RNA, 20 nt, synthetic construct
  source 1..20: mol_type = other RNA
gtaggagggagaggtggtcg

SEQ ID NO: 31933 - RNA, 20 nt, synthetic construct
  source 1..20: mol_type = other RNA
gtatattcatctaccatggt

SEQ ID NO: 31934 - RNA, 20 nt, synthetic construct
  source 1..20: mol_type = other RNA
gtccccaccatctccactct

SEQ ID NO: 31935 - RNA, 20 nt, synthetic construct
  source 1..20: mol_type = other RNA
gtccctcagggagattcagg

SEQ ID NO: 31936 - RNA, 20 nt, synthetic construct
  source 1..20: mol_type = other RNA
gtctccagtatattcatcta

SEQ ID NO: 31937 - RNA, 20 nt, synthetic construct
  source 1..20: mol_type = other RNA
gtctcttgcagtgcctttct

SEQ ID NO: 31938 - RNA, 20 nt, synthetic construct
  source 1..20: mol_type = other RNA
gtgaggtgggatcttgcata

SEQ ID NO: 31939 - RNA, 20 nt, synthetic construct
  source 1..20: mol_type = other RNA
gtgagtgcggggcctggctc

SEQ ID NO: 31940 - RNA, 20 nt, synthetic construct
  source 1..20: mol_type = other RNA
gtgcctttctccagttcctc

SEQ ID NO: 31941 - RNA, 20 nt, synthetic construct
  source 1..20: mol_type = other RNA
gtgctatgcaagatcccacc

SEQ ID NO: 31942 - RNA, 20 nt, synthetic construct
  source 1..20: mol_type = other RNA
gtggagatggtggggacaaa

SEQ ID NO: 31943 - RNA, 20 nt, synthetic construct
  source 1..20: mol_type = other RNA
gtggggacaaactggatggg

SEQ ID NO: 31944 - RNA, 20 nt, synthetic construct
  source 1..20: mol_type = other RNA
gtggtcggggagccaggccc

SEQ ID NO: 31945 - RNA, 20 nt, synthetic construct
  source 1..20: mol_type = other RNA
gttccagcctcagagatttg

SEQ ID NO: 31946 - RNA, 20 nt, synthetic construct
  source 1..20: mol_type = other RNA
gttcctcgttgagctgcctg

SEQ ID NO: 31947 - RNA, 20 nt, synthetic construct
  source 1..20: mol_type = other RNA
gttgagctgcctgaatctcc

SEQ ID NO: 31948 - RNA, 20 nt, synthetic construct
  source 1..20: mol_type = other RNA
gtttgtccccaccatctcca

SEQ ID NO: 31949 - RNA, 20 nt, synthetic construct
  source 1..20: mol_type = other RNA
taccatggtgagtgcggggc

SEQ ID NO: 31950 - RNA, 20 nt, synthetic construct
  source 1..20: mol_type = other RNA
tactggagacccctgttcca

SEQ ID NO: 31951 - RNA, 20 nt, synthetic construct
  source 1..20: mol_type = other RNA
tagatgaatatactggagac

SEQ ID NO: 31952 - RNA, 20 nt, synthetic construct
  source 1..20: mol_type = other RNA
taggagggagaggtggtcgg

SEQ ID NO: 31953 - RNA, 20 nt, synthetic construct
  source 1..20: mol_type = other RNA
tatactggagacccctgttc

SEQ ID NO: 31954 - RNA, 20 nt, synthetic construct
  source 1..20: mol_type = other RNA
tatattcatctaccatggtg

SEQ ID NO: 31955 - RNA, 20 nt, synthetic construct
  source 1..20: mol_type = other RNA
tatgcaagatcccacctcac

SEQ ID NO: 31956 - RNA, 20 nt, synthetic construct
  source 1..20: mol_type = other RNA
tattcatctaccatggtgag

SEQ ID NO: 31957 - RNA, 20 nt, synthetic construct
  source 1..20: mol_type = other RNA
tcaacgaggaactggagaaa

SEQ ID NO: 31958 - RNA, 20 nt, synthetic construct
  source 1..20: mol_type = other RNA
tcaccatggtagatgaatat

SEQ ID NO: 31959 - RNA, 20 nt, synthetic construct
  source 1..20: mol_type = other RNA
tcactgcctttgtctcttgc

SEQ ID NO: 31960 - RNA, 20 nt, synthetic construct
  source 1..20: mol_type = other RNA
tcagagatttgccagagccc

SEQ ID NO: 31961 - RNA, 20 nt, synthetic construct
  source 1..20: mol_type = other RNA
tcaggcagctcaacgaggaa

SEQ ID NO: 31962 - RNA, 20 nt, synthetic construct
  source 1..20: mol_type = other RNA
tcagggagattcaggcagct

SEQ ID NO: 31963 - RNA, 20 nt, synthetic construct
  source 1..20: mol_type = other RNA
tcatctaccatggtgagtgc

SEQ ID NO: 31964 - RNA, 20 nt, synthetic construct
  source 1..20: mol_type = other RNA
tccactctgccccatgggct

SEQ ID NO: 31965 - RNA, 20 nt, synthetic construct
  source 1..20: mol_type = other RNA
tccagcctcagagatttgcc

SEQ ID NO: 31966 - RNA, 20 nt, synthetic construct
  source 1..20: mol_type = other RNA
tccagtatattcatctacca

SEQ ID NO: 31967 - RNA, 20 nt, synthetic construct
  source 1..20: mol_type = other RNA
tccagttcctcgttgagctg

SEQ ID NO: 31968 - RNA, 20 nt, synthetic construct
  source 1..20: mol_type = other RNA
tccagtttgtccccaccatc

SEQ ID NO: 31969 - RNA, 20 nt, synthetic construct
  source 1..20: mol_type = other RNA
tcccacctcactgcctttgt

SEQ ID NO: 31970 - RNA, 20 nt, synthetic construct
  source 1..20: mol_type = other RNA
tccccaccatctccactctg

SEQ ID NO: 31971 - RNA, 20 nt, synthetic construct
  source 1..20: mol_type = other RNA
tccctcagggagattcaggc

SEQ ID NO: 31972 - RNA, 20 nt, synthetic construct
  source 1..20: mol_type = other RNA
tccctgagggacccatccag

SEQ ID NO: 31973 - RNA, 20 nt, synthetic construct
  source 1..20: mol_type = other RNA
tcctcgttgagctgcctgaa

SEQ ID NO: 31974 - RNA, 20 nt, synthetic construct
  source 1..20: mol_type = other RNA
tcggggagccaggccccgca

SEQ ID NO: 31975 - RNA, 20 nt, synthetic construct
  source 1..20: mol_type = other RNA
tcgttgagctgcctgaatct

SEQ ID NO: 31976 - RNA, 20 nt, synthetic construct
  source 1..20: mol_type = other RNA
tctaccatggtgagtgcggg

SEQ ID NO: 31977 - RNA, 20 nt, synthetic construct
  source 1..20: mol_type = other RNA
tctccactctgccccatggg

SEQ ID NO: 31978 - RNA, 20 nt, synthetic construct
  source 1..20: mol_type = other RNA
tctccagtatattcatctac

SEQ ID NO: 31979 - RNA, 20 nt, synthetic construct
  source 1..20: mol_type = other RNA
tctccagttcctcgttgagc

SEQ ID NO: 31980 - RNA, 20 nt, synthetic construct
  source 1..20: mol_type = other RNA
tctccctgagggacccatcc

SEQ ID NO: 31981 - RNA, 20 nt, synthetic construct
  source 1..20: mol_type = other RNA
tctctgaggctggaacaggg

SEQ ID NO: 31982 - RNA, 20 nt, synthetic construct
  source 1..20: mol_type = other RNA
tctcttgcagtgcctttctc

SEQ ID NO: 31983 - RNA, 20 nt, synthetic construct
  source 1..20: mol_type = other RNA
tctgaggctggaacaggggt

SEQ ID NO: 31984 - RNA, 20 nt, synthetic construct
  source 1..20: mol_type = other RNA
tctgccccatgggctctggc

SEQ ID NO: 31985 - RNA, 20 nt, synthetic construct
  source 1..20: mol_type = other RNA
tctggcaaatctctgaggct

SEQ ID NO: 31986 - RNA, 20 nt, synthetic construct
  source 1..20: mol_type = other RNA
tcttgcagtgcctttctcca

SEQ ID NO: 31987 - RNA, 20 nt, synthetic construct
  source 1..20: mol_type = other RNA
tgaatatactggagacccct

SEQ ID NO: 31988 - RNA, 20 nt, synthetic construct
  source 1..20: mol_type = other RNA
tgaatctccctgagggaccc

SEQ ID NO: 31989 - RNA, 20 nt, synthetic construct
  source 1..20: mol_type = other RNA
tgagctgcctgaatctccct

SEQ ID NO: 31990 - RNA, 20 nt, synthetic construct
  source 1..20: mol_type = other RNA
tgaggctggaacaggggtct

SEQ ID NO: 31991 - RNA, 20 nt, synthetic construct
  source 1..20: mol_type = other RNA
tgagggacccatccagtttg

SEQ ID NO: 31992 - RNA, 20 nt, synthetic construct
  source 1..20: mol_type = other RNA
tgagtgcggggcctggctcc

SEQ ID NO: 31993 - RNA, 20 nt, synthetic construct
  source 1..20: mol_type = other RNA
tgcaagagacaaaggcagtg

SEQ ID NO: 31994 - RNA, 20 nt, synthetic construct
  source 1..20: mol_type = other RNA
tgcaagatcccacctcactg

SEQ ID NO: 31995 - RNA, 20 nt, synthetic construct
  source 1..20: mol_type = other RNA
tgcagtgcctttctccagtt

SEQ ID NO: 31996 - RNA, 20 nt, synthetic construct
  source 1..20: mol_type = other RNA
tgccagagcccatggggcag

SEQ ID NO: 31997 - RNA, 20 nt, synthetic construct
  source 1..20: mol_type = other RNA
tgccccatgggctctggcaa

SEQ ID NO: 31998 - RNA, 20 nt, synthetic construct
  source 1..20: mol_type = other RNA
tgcctgaatctccctgaggg

SEQ ID NO: 31999 - RNA, 20 nt, synthetic construct
  source 1..20: mol_type = other RNA
tgcctttctccagttcctcg

SEQ ID NO: 32000 - RNA, 20 nt, synthetic construct
  source 1..20: mol_type = other RNA
tgcctttgtctcttgcagtg

SEQ ID NO: 32001 - RNA, 20 nt, synthetic construct
  source 1..20: mol_type = other RNA
tgcggggcctggctccccga

SEQ ID NO: 32002 - RNA, 20 nt, synthetic construct
  source 1..20: mol_type = other RNA
tgctatgcaagatcccacct

SEQ ID NO: 32003 - RNA, 20 nt, synthetic construct
  source 1..20: mol_type = other RNA
tggaacaggggtctccagta

SEQ ID NO: 32004 - RNA, 20 nt, synthetic construct
  source 1..20: mol_type = other RNA
tggagaaaggcactgcaaga

SEQ ID NO: 32005 - RNA, 20 nt, synthetic construct
  source 1..20: mol_type = other RNA
tggagacccctgttccagcc

SEQ ID NO: 32006 - RNA, 20 nt, synthetic construct
  source 1..20: mol_type = other RNA
tggagatggtggggacaaac

SEQ ID NO: 32007 - RNA, 20 nt, synthetic construct
  source 1..20: mol_type = other RNA
tggatgggtccctcagggag

SEQ ID NO: 32008 - RNA, 20 nt, synthetic construct
  source 1..20: mol_type = other RNA
tggcaaatctctgaggctgg

SEQ ID NO: 32009 - RNA, 20 nt, synthetic construct
  source 1..20: mol_type = other RNA
tggctccccgaccacctctc

SEQ ID NO: 32010 - RNA, 20 nt, synthetic construct
  source 1..20: mol_type = other RNA
tgggctctggcaaatctctg

SEQ ID NO: 32011 - RNA, 20 nt, synthetic construct
  source 1..20: mol_type = other RNA
tggggacaaactggatgggt

SEQ ID NO: 32012 - RNA, 20 nt, synthetic construct
  source 1..20: mol_type = other RNA
tggggcagagtggagatggt

SEQ ID NO: 32013 - RNA, 20 nt, synthetic construct
  source 1..20: mol_type = other RNA
tgggtccctcagggagattc

SEQ ID NO: 32014 - RNA, 20 nt, synthetic construct
  source 1..20: mol_type = other RNA
tggtagatgaatatactgga

SEQ ID NO: 32015 - RNA, 20 nt, synthetic construct
  source 1..20: mol_type = other RNA
tggtcggggagccaggcccc

SEQ ID NO: 32016 - RNA, 20 nt, synthetic construct
  source 1..20: mol_type = other RNA
tggtgagtgcggggcctggc

SEQ ID NO: 32017 - RNA, 20 nt, synthetic construct
  source 1..20: mol_type = other RNA
tggtggggacaaactggatg

SEQ ID NO: 32018 - RNA, 20 nt, synthetic construct
  source 1..20: mol_type = other RNA
tgtccccaccatctccactc

SEQ ID NO: 32019 - RNA, 20 nt, synthetic construct
  source 1..20: mol_type = other RNA
tgtctcttgcagtgcctttc

SEQ ID NO: 32020 - RNA, 20 nt, synthetic construct
  source 1..20: mol_type = other RNA
tgttccagcctcagagattt

SEQ ID NO: 32021 - RNA, 20 nt, synthetic construct
  source 1..20: mol_type = other RNA
ttcaggcagctcaacgagga

SEQ ID NO: 32022 - RNA, 20 nt, synthetic construct
  source 1..20: mol_type = other RNA
ttcatctaccatggtgagtg

SEQ ID NO: 32023 - RNA, 20 nt, synthetic construct
  source 1..20: mol_type = other RNA
ttccagcctcagagatttgc

SEQ ID NO: 32024 - RNA, 20 nt, synthetic construct
  source 1..20: mol_type = other RNA
ttcctcgttgagctgcctga

SEQ ID NO: 32025 - RNA, 20 nt, synthetic construct
  source 1..20: mol_type = other RNA
ttctccagttcctcgttgag

SEQ ID NO: 32026 - RNA, 20 nt, synthetic construct
  source 1..20: mol_type = other RNA
ttgagctgcctgaatctccc

SEQ ID NO: 32027 - RNA, 20 nt, synthetic construct
  source 1..20: mol_type = other RNA
ttgcagtgcctttctccagt

SEQ ID NO: 32028 - RNA, 20 nt, synthetic construct
  source 1..20: mol_type = other RNA
ttgccagagcccatggggca

SEQ ID NO: 32029 - RNA, 20 nt, synthetic construct
  source 1..20: mol_type = other RNA
ttgtccccaccatctccact

SEQ ID NO: 32030 - RNA, 20 nt, synthetic construct
  source 1..20: mol_type = other RNA
ttgtctcttgcagtgccttt

SEQ ID NO: 32031 - RNA, 20 nt, synthetic construct
  source 1..20: mol_type = other RNA
tttctccagttcctcgttga

SEQ ID NO: 32032 - RNA, 20 nt, synthetic construct
  source 1..20: mol_type = other RNA
tttgccagagcccatggggc

SEQ ID NO: 32033 - RNA, 20 nt, synthetic construct
  source 1..20: mol_type = other RNA
tttgtccccaccatctccac

SEQ ID NO: 32034 - RNA, 20 nt, synthetic construct
  source 1..20: mol_type = other RNA
tttgtctcttgcagtgcctt

SEQ ID NO: 32035 - RNA, 21 nt, synthetic construct
  source 1..21: mol_type = other RNA
aaactggatgggtccctcagg

SEQ ID NO: 32036 - RNA, 21 nt, synthetic construct
  source 1..21: mol_type = other RNA
aaaggcactgcaagagacaaa

SEQ ID NO: 32037 - RNA, 21 nt, synthetic construct
  source 1..21: mol_type = other RNA
aaaggcagtgaggtgggatct

SEQ ID NO: 32038 - RNA, 21 nt, synthetic construct
  source 1..21: mol_type = other RNA
aaatctctgaggctggaacag

SEQ ID NO: 32039 - RNA, 21 nt, synthetic construct
  source 1..21: mol_type = other RNA
aacaggggtctccagtatatt

SEQ ID NO: 32040 - RNA, 21 nt, synthetic construct
  source 1..21: mol_type = other RNA
aacgaggaactggagaaaggc

SEQ ID NO: 32041 - RNA, 21 nt, synthetic construct
  source 1..21: mol_type = other RNA
aactggagaaaggcactgcaa

SEQ ID NO: 32042 - RNA, 21 nt, synthetic construct
  source 1..21: mol_type = other RNA
aactggatgggtccctcaggg

SEQ ID NO: 32043 - RNA, 21 nt, synthetic construct
  source 1..21: mol_type = other RNA
aagagacaaaggcagtgaggt

SEQ ID NO: 32044 - RNA, 21 nt, synthetic construct
  source 1..21: mol_type = other RNA
aagatcccacctcactgcctt

SEQ ID NO: 32045 - RNA, 21 nt, synthetic construct
  source 1..21: mol_type = other RNA
aaggcactgcaagagacaaag

SEQ ID NO: 32046 - RNA, 21 nt, synthetic construct
  source 1..21: mol_type = other RNA
aaggcagtgaggtgggatctt

SEQ ID NO: 32047 - RNA, 21 nt, synthetic construct
  source 1..21: mol_type = other RNA
aatatactggagacccctgtt

SEQ ID NO: 32048 - RNA, 21 nt, synthetic construct
  source 1..21: mol_type = other RNA
aatctccctgagggacccatc

SEQ ID NO: 32049 - RNA, 21 nt, synthetic construct
  source 1..21: mol_type = other RNA
aatctctgaggctggaacagg

SEQ ID NO: 32050 - RNA, 21 nt, synthetic construct
  source 1..21: mol_type = other RNA
acaaactggatgggtccctca

SEQ ID NO: 32051 - RNA, 21 nt, synthetic construct
  source 1..21: mol_type = other RNA
acaaaggcagtgaggtgggat

SEQ ID NO: 32052 - RNA, 21 nt, synthetic construct
  source 1..21: mol_type = other RNA
acaggggtctccagtatattc

SEQ ID NO: 32053 - RNA, 21 nt, synthetic construct
  source 1..21: mol_type = other RNA
acaggtgctatgcaagatccc

SEQ ID NO: 32054 - RNA, 21 nt, synthetic construct
  source 1..21: mol_type = other RNA
accatctccactctgccccat

SEQ ID NO: 32055 - RNA, 21 nt, synthetic construct
  source 1..21: mol_type = other RNA
accatggtagatgaatatact

SEQ ID NO: 32056 - RNA, 21 nt, synthetic construct
  source 1..21: mol_type = other RNA
accatggtgagtgcggggcct

SEQ ID NO: 32057 - RNA, 21 nt, synthetic construct
  source 1..21: mol_type = other RNA
acccatccagtttgtccccac

SEQ ID NO: 32058 - RNA, 21 nt, synthetic construct
  source 1..21: mol_type = other RNA
acccctgttccagcctcagag

SEQ ID NO: 32059 - RNA, 21 nt, synthetic construct
  source 1..21: mol_type = other RNA
acctcactgcctttgtctctt

SEQ ID NO: 32060 - RNA, 21 nt, synthetic construct
  source 1..21: mol_type = other RNA
acgaggaactggagaaaggca

SEQ ID NO: 32061 - RNA, 21 nt, synthetic construct
  source 1..21: mol_type = other RNA
actcaccatggtagatgaata

SEQ ID NO: 32062 - RNA, 21 nt, synthetic construct
  source 1..21: mol_type = other RNA
actctgccccatgggctctgg

SEQ ID NO: 32063 - RNA, 21 nt, synthetic construct
  source 1..21: mol_type = other RNA
actgcaagagacaaaggcagt

SEQ ID NO: 32064 - RNA, 21 nt, synthetic construct
  source 1..21: mol_type = other RNA
actgcctttgtctcttgcagt

SEQ ID NO: 32065 - RNA, 21 nt, synthetic construct
  source 1..21: mol_type = other RNA
actggagaaaggcactgcaag

SEQ ID NO: 32066 - RNA, 21 nt, synthetic construct
  source 1..21: mol_type = other RNA
actggagacccctgttccagc

SEQ ID NO: 32067 - RNA, 21 nt, synthetic construct
  source 1..21: mol_type = other RNA
actggatgggtccctcaggga

SEQ ID NO: 32068 - RNA, 21 nt, synthetic construct
  source 1..21: mol_type = other RNA
agaaaggcactgcaagagaca

SEQ ID NO: 32069 - RNA, 21 nt, synthetic construct
  source 1..21: mol_type = other RNA
agacaaaggcagtgaggtggg

SEQ ID NO: 32070 - RNA, 21 nt, synthetic construct
  source 1..21: mol_type = other RNA
agacccctgttccagcctcag

SEQ ID NO: 32071 - RNA, 21 nt, synthetic construct
  source 1..21: mol_type = other RNA
agagacaaaggcagtgaggtg

SEQ ID NO: 32072 - RNA, 21 nt, synthetic construct
  source 1..21: mol_type = other RNA
agagatttgccagagcccatg

SEQ ID NO: 32073 - RNA, 21 nt, synthetic construct
  source 1..21: mol_type = other RNA
agagcccatggggcagagtgg

SEQ ID NO: 32074 - RNA, 21 nt, synthetic construct
  source 1..21: mol_type = other RNA
agaggtggtcggggagccagg

SEQ ID NO: 32075 - RNA, 21 nt, synthetic construct
  source 1..21: mol_type = other RNA
agagtggagatggtggggaca

SEQ ID NO: 32076 - RNA, 21 nt, synthetic construct
  source 1..21: mol_type = other RNA
agatcccacctcactgccttt

SEQ ID NO: 32077 - RNA, 21 nt, synthetic construct
  source 1..21: mol_type = other RNA
agatgaatatactggagaccc

SEQ ID NO: 32078 - RNA, 21 nt, synthetic construct
  source 1..21: mol_type = other RNA
agatggtggggacaaactgga

SEQ ID NO: 32079 - RNA, 21 nt, synthetic construct
  source 1..21: mol_type = other RNA
agattcaggcagctcaacgag

SEQ ID NO: 32080 - RNA, 21 nt, synthetic construct
  source 1..21: mol_type = other RNA
agatttgccagagcccatggg

SEQ ID NO: 32081 - RNA, 21 nt, synthetic construct
  source 1..21: mol_type = other RNA
agccaggccccgcactcacca

SEQ ID NO: 32082 - RNA, 21 nt, synthetic construct
  source 1..21: mol_type = other RNA
agcccatggggcagagtggag

SEQ ID NO: 32083 - RNA, 21 nt, synthetic construct
  source 1..21: mol_type = other RNA
agcctcagagatttgccagag

SEQ ID NO: 32084 - RNA, 21 nt, synthetic construct
  source 1..21: mol_type = other RNA
agctcaacgaggaactggaga

SEQ ID NO: 32085 - RNA, 21 nt, synthetic construct
  source 1..21: mol_type = other RNA
agctgcctgaatctccctgag

SEQ ID NO: 32086 - RNA, 21 nt, synthetic construct
  source 1..21: mol_type = other RNA
aggaactggagaaaggcactg

SEQ ID NO: 32087 - RNA, 21 nt, synthetic construct
  source 1..21: mol_type = other RNA
aggagggagaggtggtcgggg

SEQ ID NO: 32088 - RNA, 21 nt, synthetic construct
  source 1..21: mol_type = other RNA
aggcactgcaagagacaaagg

SEQ ID NO: 32089 - RNA, 21 nt, synthetic construct
  source 1..21: mol_type = other RNA
aggcagctcaacgaggaactg

SEQ ID NO: 32090 - RNA, 21 nt, synthetic construct
  source 1..21: mol_type = other RNA
aggcagtgaggtgggatcttg

SEQ ID NO: 32091 - RNA, 21 nt, synthetic construct
  source 1..21: mol_type = other RNA
aggccccgcactcaccatggt

SEQ ID NO: 32092 - RNA, 21 nt, synthetic construct
  source 1..21: mol_type = other RNA
aggctggaacaggggtctcca

SEQ ID NO: 32093 - RNA, 21 nt, synthetic construct
  source 1..21: mol_type = other RNA
agggacccatccagtttgtcc

SEQ ID NO: 32094 - RNA, 21 nt, synthetic construct
  source 1..21: mol_type = other RNA
agggagaggtggtcggggagc

SEQ ID NO: 32095 - RNA, 21 nt, synthetic construct
  source 1..21: mol_type = other RNA
agggagattcaggcagctcaa

SEQ ID NO: 32096 - RNA, 21 nt, synthetic construct
  source 1..21: mol_type = other RNA
aggggtctccagtatattcat

SEQ ID NO: 32097 - RNA, 21 nt, synthetic construct
  source 1..21: mol_type = other RNA
aggtaggagggagaggtggtc

SEQ ID NO: 32098 - RNA, 21 nt, synthetic construct
  source 1..21: mol_type = other RNA
aggtgctatgcaagatcccac

SEQ ID NO: 32099 - RNA, 21 nt, synthetic construct
  source 1..21: mol_type = other RNA
aggtggtcggggagccaggcc

SEQ ID NO: 32100 - RNA, 21 nt, synthetic construct
  source 1..21: mol_type = other RNA
agtatattcatctaccatggt

SEQ ID NO: 32101 - RNA, 21 nt, synthetic construct
  source 1..21: mol_type = other RNA
agtgaggtgggatcttgcata

SEQ ID NO: 32102 - RNA, 21 nt, synthetic construct
  source 1..21: mol_type = other RNA
agtgcctttctccagttcctc

SEQ ID NO: 32103 - RNA, 21 nt, synthetic construct
  source 1..21: mol_type = other RNA
agtggagatggtggggacaaa

SEQ ID NO: 32104 - RNA, 21 nt, synthetic construct
  source 1..21: mol_type = other RNA
agttcctcgttgagctgcctg

SEQ ID NO: 32105 - RNA, 21 nt, synthetic construct
  source 1..21: mol_type = other RNA
agtttgtccccaccatctcca

SEQ ID NO: 32106 - RNA, 21 nt, synthetic construct
  source 1..21: mol_type = other RNA
atactggagacccctgttcca

SEQ ID NO: 32107 - RNA, 21 nt, synthetic construct
  source 1..21: mol_type = other RNA
atatactggagacccctgttc

SEQ ID NO: 32108 - RNA, 21 nt, synthetic construct
  source 1..21: mol_type = other RNA
atattcatctaccatggtgag

SEQ ID NO: 32109 - RNA, 21 nt, synthetic construct
  source 1..21: mol_type = other RNA
atccagtttgtccccaccatc

SEQ ID NO: 32110 - RNA, 21 nt, synthetic construct
  source 1..21: mol_type = other RNA
atcccacctcactgcctttgt

SEQ ID NO: 32111 - RNA, 21 nt, synthetic construct
  source 1..21: mol_type = other RNA
atctaccatggtgagtgcggg

SEQ ID NO: 32112 - RNA, 21 nt, synthetic construct
  source 1..21: mol_type = other RNA
atctccactctgccccatggg

SEQ ID NO: 32113 - RNA, 21 nt, synthetic construct
  source 1..21: mol_type = other RNA
atctccctgagggacccatcc

SEQ ID NO: 32114 - RNA, 21 nt, synthetic construct
  source 1..21: mol_type = other RNA
atctctgaggctggaacaggg

SEQ ID NO: 32115 - RNA, 21 nt, synthetic construct
  source 1..21: mol_type = other RNA
atgaatatactggagacccct

SEQ ID NO: 32116 - RNA, 21 nt, synthetic construct
  source 1..21: mol_type = other RNA
atgcaagatcccacctcactg

SEQ ID NO: 32117 - RNA, 21 nt, synthetic construct
  source 1..21: mol_type = other RNA
atgggctctggcaaatctctg

SEQ ID NO: 32118 - RNA, 21 nt, synthetic construct
  source 1..21: mol_type = other RNA
atggggcagagtggagatggt

SEQ ID NO: 32119 - RNA, 21 nt, synthetic construct
  source 1..21: mol_type = other RNA
atgggtccctcagggagattc

SEQ ID NO: 32120 - RNA, 21 nt, synthetic construct
  source 1..21: mol_type = other RNA
atggtagatgaatatactgga

SEQ ID NO: 32121 - RNA, 21 nt, synthetic construct
  source 1..21: mol_type = other RNA
atggtgagtgcggggcctggc

SEQ ID NO: 32122 - RNA, 21 nt, synthetic construct
  source 1..21: mol_type = other RNA
atggtggggacaaactggatg

SEQ ID NO: 32123 - RNA, 21 nt, synthetic construct
  source 1..21: mol_type = other RNA
attcaggcagctcaacgagga

SEQ ID NO: 32124 - RNA, 21 nt, synthetic construct
  source 1..21: mol_type = other RNA
attcatctaccatggtgagtg

SEQ ID NO: 32125 - RNA, 21 nt, synthetic construct
  source 1..21: mol_type = other RNA
atttgccagagcccatggggc

SEQ ID NO: 32126 - RNA, 21 nt, synthetic construct
  source 1..21: mol_type = other RNA
caaactggatgggtccctcag

SEQ ID NO: 32127 - RNA, 21 nt, synthetic construct
  source 1..21: mol_type = other RNA
caaaggcagtgaggtgggatc

SEQ ID NO: 32128 - RNA, 21 nt, synthetic construct
  source 1..21: mol_type = other RNA
caaatctctgaggctggaaca

SEQ ID NO: 32129 - RNA, 21 nt, synthetic construct
  source 1..21: mol_type = other RNA
caacgaggaactggagaaagg

SEQ ID NO: 32130 - RNA, 21 nt, synthetic construct
  source 1..21: mol_type = other RNA
caagagacaaaggcagtgagg

SEQ ID NO: 32131 - RNA, 21 nt, synthetic construct
  source 1..21: mol_type = other RNA
caagatcccacctcactgcct

SEQ ID NO: 32132 - RNA, 21 nt, synthetic construct
  source 1..21: mol_type = other RNA
caccatctccactctgcccca

SEQ ID NO: 32133 - RNA, 21 nt, synthetic construct
  source 1..21: mol_type = other RNA
caccatggtagatgaatatac

SEQ ID NO: 32134 - RNA, 21 nt, synthetic construct
  source 1..21: mol_type = other RNA
cacctcactgcctttgtctct

SEQ ID NO: 32135 - RNA, 21 nt, synthetic construct
  source 1..21: mol_type = other RNA
cactcaccatggtagatgaat

SEQ ID NO: 32136 - RNA, 21 nt, synthetic construct
  source 1..21: mol_type = other RNA
cactctgccccatgggctctg

SEQ ID NO: 32137 - RNA, 21 nt, synthetic construct
  source 1..21: mol_type = other RNA
cactgcaagagacaaaggcag

SEQ ID NO: 32138 - RNA, 21 nt, synthetic construct
  source 1..21: mol_type = other RNA
cactgcctttgtctcttgcag

SEQ ID NO: 32139 - RNA, 21 nt, synthetic construct
  source 1..21: mol_type = other RNA
cagagatttgccagagcccat

SEQ ID NO: 32140 - RNA, 21 nt, synthetic construct
  source 1..21: mol_type = other RNA
cagagcccatggggcagagtg

SEQ ID NO: 32141 - RNA, 21 nt, synthetic construct
  source 1..21: mol_type = other RNA
cagagtggagatggtggggac

SEQ ID NO: 32142 - RNA, 21 nt, synthetic construct
  source 1..21: mol_type = other RNA
cagcctcagagatttgccaga

SEQ ID NO: 32143 - RNA, 21 nt, synthetic construct
  source 1..21: mol_type = other RNA
cagctcaacgaggaactggag

SEQ ID NO: 32144 - RNA, 21 nt, synthetic construct
  source 1..21: mol_type = other RNA
caggcagctcaacgaggaact

SEQ ID NO: 32145 - RNA, 21 nt, synthetic construct
  source 1..21: mol_type = other RNA
caggccccgcactcaccatgg

SEQ ID NO: 32146 - RNA, 21 nt, synthetic construct
  source 1..21: mol_type = other RNA
cagggagattcaggcagctca

SEQ ID NO: 32147 - RNA, 21 nt, synthetic construct
  source 1..21: mol_type = other RNA
caggggtctccagtatattca

SEQ ID NO: 32148 - RNA, 21 nt, synthetic construct
  source 1..21: mol_type = other RNA
caggtaggagggagaggtggt

SEQ ID NO: 32149 - RNA, 21 nt, synthetic construct
  source 1..21: mol_type = other RNA
caggtgctatgcaagatccca

SEQ ID NO: 32150 - RNA, 21 nt, synthetic construct
  source 1..21: mol_type = other RNA
cagtatattcatctaccatgg

SEQ ID NO: 32151 - RNA, 21 nt, synthetic construct
  source 1..21: mol_type = other RNA
cagtgaggtgggatcttgcat

SEQ ID NO: 32152 - RNA, 21 nt, synthetic construct
  source 1..21: mol_type = other RNA
cagtgcctttctccagttcct

SEQ ID NO: 32153 - RNA, 21 nt, synthetic construct
  source 1..21: mol_type = other RNA
cagttcctcgttgagctgcct

SEQ ID NO: 32154 - RNA, 21 nt, synthetic construct
  source 1..21: mol_type = other RNA
cagtttgtccccaccatctcc

SEQ ID NO: 32155 - RNA, 21 nt, synthetic construct
  source 1..21: mol_type = other RNA
catccagtttgtccccaccat

SEQ ID NO: 32156 - RNA, 21 nt, synthetic construct
  source 1..21: mol_type = other RNA
catctaccatggtgagtgcgg

SEQ ID NO: 32157 - RNA, 21 nt, synthetic construct
  source 1..21: mol_type = other RNA
catctccactctgccccatgg

SEQ ID NO: 32158 - RNA, 21 nt, synthetic construct
  source 1..21: mol_type = other RNA
catgggctctggcaaatctct

SEQ ID NO: 32159 - RNA, 21 nt, synthetic construct
  source 1..21: mol_type = other RNA
catggggcagagtggagatgg

SEQ ID NO: 32160 - RNA, 21 nt, synthetic construct
  source 1..21: mol_type = other RNA
catggtagatgaatatactgg

SEQ ID NO: 32161 - RNA, 21 nt, synthetic construct
  source 1..21: mol_type = other RNA
catggtgagtgcggggcctgg

SEQ ID NO: 32162 - RNA, 21 nt, synthetic construct
  source 1..21: mol_type = other RNA
ccaccatctccactctgcccc

SEQ ID NO: 32163 - RNA, 21 nt, synthetic construct
  source 1..21: mol_type = other RNA
ccacctcactgcctttgtctc

SEQ ID NO: 32164 - RNA, 21 nt, synthetic construct
  source 1..21: mol_type = other RNA
ccactctgccccatgggctct

SEQ ID NO: 32165 - RNA, 21 nt, synthetic construct
  source 1..21: mol_type = other RNA
ccagagcccatggggcagagt

SEQ ID NO: 32166 - RNA, 21 nt, synthetic construct
  source 1..21: mol_type = other RNA
ccagcctcagagatttgccag

SEQ ID NO: 32167 - RNA, 21 nt, synthetic construct
  source 1..21: mol_type = other RNA
ccaggccccgcactcaccatg

SEQ ID NO: 32168 - RNA, 21 nt, synthetic construct
  source 1..21: mol_type = other RNA
ccagtatattcatctaccatg

SEQ ID NO: 32169 - RNA, 21 nt, synthetic construct
  source 1..21: mol_type = other RNA
ccagttcctcgttgagctgcc

SEQ ID NO: 32170 - RNA, 21 nt, synthetic construct
  source 1..21: mol_type = other RNA
ccagtttgtccccaccatctc

SEQ ID NO: 32171 - RNA, 21 nt, synthetic construct
  source 1..21: mol_type = other RNA
ccatccagtttgtccccacca

SEQ ID NO: 32172 - RNA, 21 nt, synthetic construct
  source 1..21: mol_type = other RNA
ccatctccactctgccccatg

SEQ ID NO: 32173 - RNA, 21 nt, synthetic construct
  source 1..21: mol_type = other RNA
ccatgggctctggcaaatctc

SEQ ID NO: 32174 - RNA, 21 nt, synthetic construct
  source 1..21: mol_type = other RNA
ccatggggcagagtggagatg

SEQ ID NO: 32175 - RNA, 21 nt, synthetic construct
  source 1..21: mol_type = other RNA
ccatggtagatgaatatactg

SEQ ID NO: 32176 - RNA, 21 nt, synthetic construct
  source 1..21: mol_type = other RNA
ccatggtgagtgcggggcctg

SEQ ID NO: 32177 - RNA, 21 nt, synthetic construct
  source 1..21: mol_type = other RNA
cccaccatctccactctgccc

SEQ ID NO: 32178 - RNA, 21 nt, synthetic construct
  source 1..21: mol_type = other RNA
cccacctcactgcctttgtct

SEQ ID NO: 32179 - RNA, 21 nt, synthetic construct
  source 1..21: mol_type = other RNA
cccatccagtttgtccccacc

SEQ ID NO: 32180 - RNA, 21 nt, synthetic construct
  source 1..21: mol_type = other RNA
cccatgggctctggcaaatct

SEQ ID NO: 32181 - RNA, 21 nt, synthetic construct
  source 1..21: mol_type = other RNA
cccatggggcagagtggagat

SEQ ID NO: 32182 - RNA, 21 nt, synthetic construct
  source 1..21: mol_type = other RNA
ccccaccatctccactctgcc

SEQ ID NO: 32183 - RNA, 21 nt, synthetic construct
  source 1..21: mol_type = other RNA
ccccatgggctctggcaaatc

SEQ ID NO: 32184 - RNA, 21 nt, synthetic construct
  source 1..21: mol_type = other RNA
ccccgcactcaccatggtaga

SEQ ID NO: 32185 - RNA, 21 nt, synthetic construct
  source 1..21: mol_type = other RNA
cccctgttccagcctcagaga

SEQ ID NO: 32186 - RNA, 21 nt, synthetic construct
  source 1..21: mol_type = other RNA
cccgcactcaccatggtagat

SEQ ID NO: 32187 - RNA, 21 nt, synthetic construct
  source 1..21: mol_type = other RNA
ccctcagggagattcaggcag

SEQ ID NO: 32188 - RNA, 21 nt, synthetic construct
  source 1..21: mol_type = other RNA
ccctgagggacccatccagtt

SEQ ID NO: 32189 - RNA, 21 nt, synthetic construct
  source 1..21: mol_type = other RNA
ccctgttccagcctcagagat

SEQ ID NO: 32190 - RNA, 21 nt, synthetic construct
  source 1..21: mol_type = other RNA
ccgcactcaccatggtagatg

SEQ ID NO: 32191 - RNA, 21 nt, synthetic construct
  source 1..21: mol_type = other RNA
cctcactgcctttgtctcttg

SEQ ID NO: 32192 - RNA, 21 nt, synthetic construct
  source 1..21: mol_type = other RNA
cctcagagatttgccagagcc

SEQ ID NO: 32193 - RNA, 21 nt, synthetic construct
  source 1..21: mol_type = other RNA
cctcagggagattcaggcagc

SEQ ID NO: 32194 - RNA, 21 nt, synthetic construct
  source 1..21: mol_type = other RNA
cctcgttgagctgcctgaatc

SEQ ID NO: 32195 - RNA, 21 nt, synthetic construct
  source 1..21: mol_type = other RNA
cctgaatctccctgagggacc

SEQ ID NO: 32196 - RNA, 21 nt, synthetic construct
  source 1..21: mol_type = other RNA
cctgagggacccatccagttt

SEQ ID NO: 32197 - RNA, 21 nt, synthetic construct
  source 1..21: mol_type = other RNA
cctggctccccgaccacctct

SEQ ID NO: 32198 - RNA, 21 nt, synthetic construct
  source 1..21: mol_type = other RNA
cctgttccagcctcagagatt

SEQ ID NO: 32199 - RNA, 21 nt, synthetic construct
  source 1..21: mol_type = other RNA
cctttctccagttcctcgttg

SEQ ID NO: 32200 - RNA, 21 nt, synthetic construct
  source 1..21: mol_type = other RNA
cctttgtctcttgcagtgcct

SEQ ID NO: 32201 - RNA, 21 nt, synthetic construct
  source 1..21: mol_type = other RNA
cgaggaactggagaaaggcac

SEQ ID NO: 32202 - RNA, 21 nt, synthetic construct
  source 1..21: mol_type = other RNA
cgcactcaccatggtagatga

SEQ ID NO: 32203 - RNA, 21 nt, synthetic construct
  source 1..21: mol_type = other RNA
cgttgagctgcctgaatctcc

SEQ ID NO: 32204 - RNA, 21 nt, synthetic construct
  source 1..21: mol_type = other RNA
ctaccatggtgagtgcggggc

SEQ ID NO: 32205 - RNA, 21 nt, synthetic construct
  source 1..21: mol_type = other RNA
ctatgcaagatcccacctcac

SEQ ID NO: 32206 - RNA, 21 nt, synthetic construct
  source 1..21: mol_type = other RNA
ctcaacgaggaactggagaaa

SEQ ID NO: 32207 - RNA, 21 nt, synthetic construct
  source 1..21: mol_type = other RNA
ctcaccatggtagatgaatat

SEQ ID NO: 32208 - RNA, 21 nt, synthetic construct
  source 1..21: mol_type = other RNA
ctcactgcctttgtctcttgc

SEQ ID NO: 32209 - RNA, 21 nt, synthetic construct
  source 1..21: mol_type = other RNA
ctcagagatttgccagagccc

SEQ ID NO: 32210 - RNA, 21 nt, synthetic construct
  source 1..21: mol_type = other RNA
ctcagggagattcaggcagct

SEQ ID NO: 32211 - RNA, 21 nt, synthetic construct
  source 1..21: mol_type = other RNA
ctccactctgccccatgggct

SEQ ID NO: 32212 - RNA, 21 nt, synthetic construct
  source 1..21: mol_type = other RNA
ctccagtatattcatctacca

SEQ ID NO: 32213 - RNA, 21 nt, synthetic construct
  source 1..21: mol_type = other RNA
ctccagttcctcgttgagctg

SEQ ID NO: 32214 - RNA, 21 nt, synthetic construct
  source 1..21: mol_type = other RNA
ctccctgagggacccatccag

SEQ ID NO: 32215 - RNA, 21 nt, synthetic construct
  source 1..21: mol_type = other RNA
ctcgttgagctgcctgaatct

SEQ ID NO: 32216 - RNA, 21 nt, synthetic construct
  source 1..21: mol_type = other RNA
ctctgaggctggaacaggggt

SEQ ID NO: 32217 - RNA, 21 nt, synthetic construct
  source 1..21: mol_type = other RNA
ctctgccccatgggctctggc

SEQ ID NO: 32218 - RNA, 21 nt, synthetic construct
  source 1..21: mol_type = other RNA
ctctggcaaatctctgaggct

SEQ ID NO: 32219 - RNA, 21 nt, synthetic construct
  source 1..21: mol_type = other RNA
ctcttgcagtgcctttctcca

SEQ ID NO: 32220 - RNA, 21 nt, synthetic construct
  source 1..21: mol_type = other RNA
ctgaatctccctgagggaccc

SEQ ID NO: 32221 - RNA, 21 nt, synthetic construct
  source 1..21: mol_type = other RNA
ctgaggctggaacaggggtct

SEQ ID NO: 32222 - RNA, 21 nt, synthetic construct
  source 1..21: mol_type = other RNA
ctgagggacccatccagtttg

SEQ ID NO: 32223 - RNA, 21 nt, synthetic construct
  source 1..21: mol_type = other RNA
ctgcaagagacaaaggcagtg

SEQ ID NO: 32224 - RNA, 21 nt, synthetic construct
  source 1..21: mol_type = other RNA
ctgccccatgggctctggcaa

SEQ ID NO: 32225 - RNA, 21 nt, synthetic construct
  source 1..21: mol_type = other RNA
ctgcctgaatctccctgaggg

SEQ ID NO: 32226 - RNA, 21 nt, synthetic construct
  source 1..21: mol_type = other RNA
ctgcctttgtctcttgcagtg

SEQ ID NO: 32227 - RNA, 21 nt, synthetic construct
  source 1..21: mol_type = other RNA
ctggaacaggggtctccagta

SEQ ID NO: 32228 - RNA, 21 nt, synthetic construct
  source 1..21: mol_type = other RNA
ctggagaaaggcactgcaaga

SEQ ID NO: 32229 - RNA, 21 nt, synthetic construct
  source 1..21: mol_type = other RNA
ctggagacccctgttccagcc

SEQ ID NO: 32230 - RNA, 21 nt, synthetic construct
  source 1..21: mol_type = other RNA
ctggatgggtccctcagggag

SEQ ID NO: 32231 - RNA, 21 nt, synthetic construct
  source 1..21: mol_type = other RNA
ctggcaaatctctgaggctgg

SEQ ID NO: 32232 - RNA, 21 nt, synthetic construct
  source 1..21: mol_type = other RNA
ctggctccccgaccacctctc

SEQ ID NO: 32233 - RNA, 21 nt, synthetic construct
  source 1..21: mol_type = other RNA
ctgttccagcctcagagattt

SEQ ID NO: 32234 - RNA, 21 nt, synthetic construct
  source 1..21: mol_type = other RNA
cttgcagtgcctttctccagt

SEQ ID NO: 32235 - RNA, 21 nt, synthetic construct
  source 1..21: mol_type = other RNA
ctttctccagttcctcgttga

SEQ ID NO: 32236 - RNA, 21 nt, synthetic construct
  source 1..21: mol_type = other RNA
ctttgtctcttgcagtgcctt

SEQ ID NO: 32237 - RNA, 21 nt, synthetic construct
  source 1..21: mol_type = other RNA
gaaaggcactgcaagagacaa

SEQ ID NO: 32238 - RNA, 21 nt, synthetic construct
  source 1..21: mol_type = other RNA
gaacaggggtctccagtatat

SEQ ID NO: 32239 - RNA, 21 nt, synthetic construct
  source 1..21: mol_type = other RNA
gaactggagaaaggcactgca

SEQ ID NO: 32240 - RNA, 21 nt, synthetic construct
  source 1..21: mol_type = other RNA
gaatatactggagacccctgt

SEQ ID NO: 32241 - RNA, 21 nt, synthetic construct
  source 1..21: mol_type = other RNA
gaatctccctgagggacccat

SEQ ID NO: 32242 - RNA, 21 nt, synthetic construct
  source 1..21: mol_type = other RNA
gacaaactggatgggtccctc

SEQ ID NO: 32243 - RNA, 21 nt, synthetic construct
  source 1..21: mol_type = other RNA
gacaaaggcagtgaggtggga

SEQ ID NO: 32244 - RNA, 21 nt, synthetic construct
  source 1..21: mol_type = other RNA
gacccatccagtttgtcccca

SEQ ID NO: 32245 - RNA, 21 nt, synthetic construct
  source 1..21: mol_type = other RNA
gacccctgttccagcctcaga

SEQ ID NO: 32246 - RNA, 21 nt, synthetic construct
  source 1..21: mol_type = other RNA
gagaaaggcactgcaagagac

SEQ ID NO: 32247 - RNA, 21 nt, synthetic construct
  source 1..21: mol_type = other RNA
gagacaaaggcagtgaggtgg

SEQ ID NO: 32248 - RNA, 21 nt, synthetic construct
  source 1..21: mol_type = other RNA
gagacccctgttccagcctca

SEQ ID NO: 32249 - RNA, 21 nt, synthetic construct
  source 1..21: mol_type = other RNA
gagaggtggtcggggagccag

SEQ ID NO: 32250 - RNA, 21 nt, synthetic construct
  source 1..21: mol_type = other RNA
gagatggtggggacaaactgg

SEQ ID NO: 32251 - RNA, 21 nt, synthetic construct
  source 1..21: mol_type = other RNA
gagattcaggcagctcaacga

SEQ ID NO: 32252 - RNA, 21 nt, synthetic construct
  source 1..21: mol_type = other RNA
gagatttgccagagcccatgg

SEQ ID NO: 32253 - RNA, 21 nt, synthetic construct
  source 1..21: mol_type = other RNA
gagccaggccccgcactcacc

SEQ ID NO: 32254 - RNA, 21 nt, synthetic construct
  source 1..21: mol_type = other RNA
gagcccatggggcagagtgga

SEQ ID NO: 32255 - RNA, 21 nt, synthetic construct
  source 1..21: mol_type = other RNA
gagctgcctgaatctccctga

SEQ ID NO: 32256 - RNA, 21 nt, synthetic construct
  source 1..21: mol_type = other RNA
gaggaactggagaaaggcact

SEQ ID NO: 32257 - RNA, 21 nt, synthetic construct
  source 1..21: mol_type = other RNA
gaggctggaacaggggtctcc

SEQ ID NO: 32258 - RNA, 21 nt, synthetic construct
  source 1..21: mol_type = other RNA
gagggacccatccagtttgtc

SEQ ID NO: 32259 - RNA, 21 nt, synthetic construct
  source 1..21: mol_type = other RNA
gagggagaggtggtcggggag

SEQ ID NO: 32260 - RNA, 21 nt, synthetic construct
  source 1..21: mol_type = other RNA
gaggtggtcggggagccaggc

SEQ ID NO: 32261 - RNA, 21 nt, synthetic construct
  source 1..21: mol_type = other RNA
gagtggagatggtggggacaa

SEQ ID NO: 32262 - RNA, 21 nt, synthetic construct
  source 1..21: mol_type = other RNA
gatcccacctcactgcctttg

SEQ ID NO: 32263 - RNA, 21 nt, synthetic construct
  source 1..21: mol_type = other RNA
gatgaatatactggagacccc

SEQ ID NO: 32264 - RNA, 21 nt, synthetic construct
  source 1..21: mol_type = other RNA
gatgggtccctcagggagatt

SEQ ID NO: 32265 - RNA, 21 nt, synthetic construct
  source 1..21: mol_type = other RNA
gatggtggggacaaactggat

SEQ ID NO: 32266 - RNA, 21 nt, synthetic construct
  source 1..21: mol_type = other RNA
gattcaggcagctcaacgagg

SEQ ID NO: 32267 - RNA, 21 nt, synthetic construct
  source 1..21: mol_type = other RNA
gatttgccagagcccatgggg

SEQ ID NO: 32268 - RNA, 21 nt, synthetic construct
  source 1..21: mol_type = other RNA
gcaaatctctgaggctggaac

SEQ ID NO: 32269 - RNA, 21 nt, synthetic construct
  source 1..21: mol_type = other RNA
gcaagagacaaaggcagtgag

SEQ ID NO: 32270 - RNA, 21 nt, synthetic construct
  source 1..21: mol_type = other RNA
gcaagatcccacctcactgcc

SEQ ID NO: 32271 - RNA, 21 nt, synthetic construct
  source 1..21: mol_type = other RNA
gcactcaccatggtagatgaa

SEQ ID NO: 32272 - RNA, 21 nt, synthetic construct
  source 1..21: mol_type = other RNA
gcactgcaagagacaaaggca

SEQ ID NO: 32273 - RNA, 21 nt, synthetic construct
  source 1..21: mol_type = other RNA
gcagagtggagatggtgggga

SEQ ID NO: 32274 - RNA, 21 nt, synthetic construct
  source 1..21: mol_type = other RNA
gcagctcaacgaggaactgga

SEQ ID NO: 32275 - RNA, 21 nt, synthetic construct
  source 1..21: mol_type = other RNA
gcagtgaggtgggatcttgca

SEQ ID NO: 32276 - RNA, 21 nt, synthetic construct
  source 1..21: mol_type = other RNA
gcagtgcctttctccagttcc

SEQ ID NO: 32277 - RNA, 21 nt, synthetic construct
  source 1..21: mol_type = other RNA
gccagagcccatggggcagag

SEQ ID NO: 32278 - RNA, 21 nt, synthetic construct
  source 1..21: mol_type = other RNA
gccaggccccgcactcaccat

SEQ ID NO: 32279 - RNA, 21 nt, synthetic construct
  source 1..21: mol_type = other RNA
gcccatggggcagagtggaga

SEQ ID NO: 32280 - RNA, 21 nt, synthetic construct
  source 1..21: mol_type = other RNA
gccccatgggctctggcaaat

SEQ ID NO: 32281 - RNA, 21 nt, synthetic construct
  source 1..21: mol_type = other RNA
gccccgcactcaccatggtag

SEQ ID NO: 32282 - RNA, 21 nt, synthetic construct
  source 1..21: mol_type = other RNA
gcctcagagatttgccagagc

SEQ ID NO: 32283 - RNA, 21 nt, synthetic construct
  source 1..21: mol_type = other RNA
gcctgaatctccctgagggac

SEQ ID NO: 32284 - RNA, 21 nt, synthetic construct
  source 1..21: mol_type = other RNA
gcctggctccccgaccacctc

SEQ ID NO: 32285 - RNA, 21 nt, synthetic construct
  source 1..21: mol_type = other RNA
gcctttctccagttcctcgtt

SEQ ID NO: 32286 - RNA, 21 nt, synthetic construct
  source 1..21: mol_type = other RNA
gcctttgtctcttgcagtgcc

SEQ ID NO: 32287 - RNA, 21 nt, synthetic construct
  source 1..21: mol_type = other RNA
gctatgcaagatcccacctca

SEQ ID NO: 32288 - RNA, 21 nt, synthetic construct
  source 1..21: mol_type = other RNA
gctcaacgaggaactggagaa

SEQ ID NO: 32289 - RNA, 21 nt, synthetic construct
  source 1..21: mol_type = other RNA
gctccccgaccacctctccct

SEQ ID NO: 32290 - RNA, 21 nt, synthetic construct
  source 1..21: mol_type = other RNA
gctctggcaaatctctgaggc

SEQ ID NO: 32291 - RNA, 21 nt, synthetic construct
  source 1..21: mol_type = other RNA
gctgcctgaatctccctgagg

SEQ ID NO: 32292 - RNA, 21 nt, synthetic construct
  source 1..21: mol_type = other RNA
gctggaacaggggtctccagt

SEQ ID NO: 32293 - RNA, 21 nt, synthetic construct
  source 1..21: mol_type = other RNA
ggaacaggggtctccagtata

SEQ ID NO: 32294 - RNA, 21 nt, synthetic construct
  source 1..21: mol_type = other RNA
ggaactggagaaaggcactgc

SEQ ID NO: 32295 - RNA, 21 nt, synthetic construct
  source 1..21: mol_type = other RNA
ggacaaactggatgggtccct

SEQ ID NO: 32296 - RNA, 21 nt, synthetic construct
  source 1..21: mol_type = other RNA
ggacccatccagtttgtcccc

SEQ ID NO: 32297 - RNA, 21 nt, synthetic construct
  source 1..21: mol_type = other RNA
ggagaaaggcactgcaagaga

SEQ ID NO: 32298 - RNA, 21 nt, synthetic construct
  source 1..21: mol_type = other RNA
ggagacccctgttccagcctc

SEQ ID NO: 32299 - RNA, 21 nt, synthetic construct
  source 1..21: mol_type = other RNA
ggagaggtggtcggggagcca

SEQ ID NO: 32300 - RNA, 21 nt, synthetic construct
  source 1..21: mol_type = other RNA
ggagatggtggggacaaactg

SEQ ID NO: 32301 - RNA, 21 nt, synthetic construct
  source 1..21: mol_type = other RNA
ggagattcaggcagctcaacg

SEQ ID NO: 32302 - RNA, 21 nt, synthetic construct
  source 1..21: mol_type = other RNA
ggagccaggccccgcactcac

SEQ ID NO: 32303 - RNA, 21 nt, synthetic construct
  source 1..21: mol_type = other RNA
ggagggagaggtggtcgggga

SEQ ID NO: 32304 - RNA, 21 nt, synthetic construct
  source 1..21: mol_type = other RNA
ggatgggtccctcagggagat

SEQ ID NO: 32305 - RNA, 21 nt, synthetic construct
  source 1..21: mol_type = other RNA
ggcaaatctctgaggctggaa

SEQ ID NO: 32306 - RNA, 21 nt, synthetic construct
  source 1..21: mol_type = other RNA
ggcactgcaagagacaaaggc

SEQ ID NO: 32307 - RNA, 21 nt, synthetic construct
  source 1..21: mol_type = other RNA
ggcagagtggagatggtgggg

SEQ ID NO: 32308 - RNA, 21 nt, synthetic construct
  source 1..21: mol_type = other RNA
ggcagctcaacgaggaactgg

SEQ ID NO: 32309 - RNA, 21 nt, synthetic construct
  source 1..21: mol_type = other RNA
ggcagtgaggtgggatcttgc

SEQ ID NO: 32310 - RNA, 21 nt, synthetic construct
  source 1..21: mol_type = other RNA
ggccccgcactcaccatggta

SEQ ID NO: 32311 - RNA, 21 nt, synthetic construct
  source 1..21: mol_type = other RNA
ggcctggctccccgaccacct

SEQ ID NO: 32312 - RNA, 21 nt, synthetic construct
  source 1..21: mol_type = other RNA
ggctccccgaccacctctccc

SEQ ID NO: 32313 - RNA, 21 nt, synthetic construct
  source 1..21: mol_type = other RNA
ggctctggcaaatctctgagg

SEQ ID NO: 32314 - RNA, 21 nt, synthetic construct
  source 1..21: mol_type = other RNA
ggctggaacaggggtctccag

SEQ ID NO: 32315 - RNA, 21 nt, synthetic construct
  source 1..21: mol_type = other RNA
gggacaaactggatgggtccc

SEQ ID NO: 32316 - RNA, 21 nt, synthetic construct
  source 1..21: mol_type = other RNA
gggacccatccagtttgtccc

SEQ ID NO: 32317 - RNA, 21 nt, synthetic construct
  source 1..21: mol_type = other RNA
gggagaggtggtcggggagcc

SEQ ID NO: 32318 - RNA, 21 nt, synthetic construct
  source 1..21: mol_type = other RNA
gggagattcaggcagctcaac

SEQ ID NO: 32319 - RNA, 21 nt, synthetic construct
  source 1..21: mol_type = other RNA
gggagccaggccccgcactca

SEQ ID NO: 32320 - RNA, 21 nt, synthetic construct
  source 1..21: mol_type = other RNA
gggcagagtggagatggtggg

SEQ ID NO: 32321 - RNA, 21 nt, synthetic construct
  source 1..21: mol_type = other RNA
gggctctggcaaatctctgag

SEQ ID NO: 32322 - RNA, 21 nt, synthetic construct
  source 1..21: mol_type = other RNA
ggggacaaactggatgggtcc

SEQ ID NO: 32323 - RNA, 21 nt, synthetic construct
  source 1..21: mol_type = other RNA
ggggcagagtggagatggtgg

SEQ ID NO: 32324 - RNA, 21 nt, synthetic construct
  source 1..21: mol_type = other RNA
ggggtctccagtatattcatc

SEQ ID NO: 32325 - RNA, 21 nt, synthetic construct
  source 1..21: mol_type = other RNA
gggtccctcagggagattcag

SEQ ID NO: 32326 - RNA, 21 nt, synthetic construct
  source 1..21: mol_type = other RNA
gggtctccagtatattcatct

SEQ ID NO: 32327 - RNA, 21 nt, synthetic construct
  source 1..21: mol_type = other RNA
ggtagatgaatatactggaga

SEQ ID NO: 32328 - RNA, 21 nt, synthetic construct
  source 1..21: mol_type = other RNA
ggtaggagggagaggtggtcg

SEQ ID NO: 32329 - RNA, 21 nt, synthetic construct
  source 1..21: mol_type = other RNA
ggtccctcagggagattcagg

SEQ ID NO: 32330 - RNA, 21 nt, synthetic construct
  source 1..21: mol_type = other RNA
ggtctccagtatattcatcta

SEQ ID NO: 32331 - RNA, 21 nt, synthetic construct
  source 1..21: mol_type = other RNA
ggtgagtgcggggcctggctc

SEQ ID NO: 32332 - RNA, 21 nt, synthetic construct
  source 1..21: mol_type = other RNA
ggtgctatgcaagatcccacc

SEQ ID NO: 32333 - RNA, 21 nt, synthetic construct
  source 1..21: mol_type = other RNA
ggtggggacaaactggatggg

SEQ ID NO: 32334 - RNA, 21 nt, synthetic construct
  source 1..21: mol_type = other RNA
gtagatgaatatactggagac

SEQ ID NO: 32335 - RNA, 21 nt, synthetic construct
  source 1..21: mol_type = other RNA
gtaggagggagaggtggtcgg

SEQ ID NO: 32336 - RNA, 21 nt, synthetic construct
  source 1..21: mol_type = other RNA
gtatattcatctaccatggtg

SEQ ID NO: 32337 - RNA, 21 nt, synthetic construct
  source 1..21: mol_type = other RNA
gtccccaccatctccactctg

SEQ ID NO: 32338 - RNA, 21 nt, synthetic construct
  source 1..21: mol_type = other RNA
gtccctcagggagattcaggc

SEQ ID NO: 32339 - RNA, 21 nt, synthetic construct
  source 1..21: mol_type = other RNA
gtctccagtatattcatctac

SEQ ID NO: 32340 - RNA, 21 nt, synthetic construct
  source 1..21: mol_type = other RNA
gtctcttgcagtgcctttctc

SEQ ID NO: 32341 - RNA, 21 nt, synthetic construct
  source 1..21: mol_type = other RNA
gtgagtgcggggcctggctcc

SEQ ID NO: 32342 - RNA, 21 nt, synthetic construct
  source 1..21: mol_type = other RNA
gtgcctttctccagttcctcg

SEQ ID NO: 32343 - RNA, 21 nt, synthetic construct
  source 1..21: mol_type = other RNA
gtgctatgcaagatcccacct

SEQ ID NO: 32344 - RNA, 21 nt, synthetic construct
  source 1..21: mol_type = other RNA
gtggagatggtggggacaaac

SEQ ID NO: 32345 - RNA, 21 nt, synthetic construct
  source 1..21: mol_type = other RNA
gtggggacaaactggatgggt

SEQ ID NO: 32346 - RNA, 21 nt, synthetic construct
  source 1..21: mol_type = other RNA
gttccagcctcagagatttgc

SEQ ID NO: 32347 - RNA, 21 nt, synthetic construct
  source 1..21: mol_type = other RNA
gttcctcgttgagctgcctga

SEQ ID NO: 32348 - RNA, 21 nt, synthetic construct
  source 1..21: mol_type = other RNA
gttgagctgcctgaatctccc

SEQ ID NO: 32349 - RNA, 21 nt, synthetic construct
  source 1..21: mol_type = other RNA
gtttgtccccaccatctccac

SEQ ID NO: 32350 - RNA, 21 nt, synthetic construct
  source 1..21: mol_type = other RNA
taccatggtgagtgcggggcc

SEQ ID NO: 32351 - RNA, 21 nt, synthetic construct
  source 1..21: mol_type = other RNA
tactggagacccctgttccag

SEQ ID NO: 32352 - RNA, 21 nt, synthetic construct
  source 1..21: mol_type = other RNA
tagatgaatatactggagacc

SEQ ID NO: 32353 - RNA, 21 nt, synthetic construct
  source 1..21: mol_type = other RNA
taggagggagaggtggtcggg

SEQ ID NO: 32354 - RNA, 21 nt, synthetic construct
  source 1..21: mol_type = other RNA
tatactggagacccctgttcc

SEQ ID NO: 32355 - RNA, 21 nt, synthetic construct
  source 1..21: mol_type = other RNA
tatattcatctaccatggtga

SEQ ID NO: 32356 - RNA, 21 nt, synthetic construct
  source 1..21: mol_type = other RNA
tatgcaagatcccacctcact

SEQ ID NO: 32357 - RNA, 21 nt, synthetic construct
  source 1..21: mol_type = other RNA
tattcatctaccatggtgagt

SEQ ID NO: 32358 - RNA, 21 nt, synthetic construct
  source 1..21: mol_type = other RNA
tcaacgaggaactggagaaag

SEQ ID NO: 32359 - RNA, 21 nt, synthetic construct
  source 1..21: mol_type = other RNA
tcaccatggtagatgaatata

SEQ ID NO: 32360 - RNA, 21 nt, synthetic construct
  source 1..21: mol_type = other RNA
tcactgcctttgtctcttgca

SEQ ID NO: 32361 - RNA, 21 nt, synthetic construct
  source 1..21: mol_type = other RNA
tcagagatttgccagagccca

SEQ ID NO: 32362 - RNA, 21 nt, synthetic construct
  source 1..21: mol_type = other RNA
tcaggcagctcaacgaggaac

SEQ ID NO: 32363 - RNA, 21 nt, synthetic construct
  source 1..21: mol_type = other RNA
tcagggagattcaggcagctc

SEQ ID NO: 32364 - RNA, 21 nt, synthetic construct
  source 1..21: mol_type = other RNA
tcatctaccatggtgagtgcg

SEQ ID NO: 32365 - RNA, 21 nt, synthetic construct
  source 1..21: mol_type = other RNA
tccactctgccccatgggctc

SEQ ID NO: 32366 - RNA, 21 nt, synthetic construct
  source 1..21: mol_type = other RNA
tccagcctcagagatttgcca

SEQ ID NO: 32367 - RNA, 21 nt, synthetic construct
  source 1..21: mol_type = other RNA
tccagtatattcatctaccat

SEQ ID NO: 32368 - RNA, 21 nt, synthetic construct
  source 1..21: mol_type = other RNA
tccagttcctcgttgagctgc

SEQ ID NO: 32369 - RNA, 21 nt, synthetic construct
  source 1..21: mol_type = other RNA
tccagtttgtccccaccatct

SEQ ID NO: 32370 - RNA, 21 nt, synthetic construct
  source 1..21: mol_type = other RNA
tcccacctcactgcctttgtc

SEQ ID NO: 32371 - RNA, 21 nt, synthetic construct
  source 1..21: mol_type = other RNA
tccccaccatctccactctgc

SEQ ID NO: 32372 - RNA, 21 nt, synthetic construct
  source 1..21: mol_type = other RNA
tccctcagggagattcaggca

SEQ ID NO: 32373 - RNA, 21 nt, synthetic construct
  source 1..21: mol_type = other RNA
tccctgagggacccatccagt

SEQ ID NO: 32374 - RNA, 21 nt, synthetic construct
  source 1..21: mol_type = other RNA
tcctcgttgagctgcctgaat

SEQ ID NO: 32375 - RNA, 21 nt, synthetic construct
  source 1..21: mol_type = other RNA
tcgttgagctgcctgaatctc

SEQ ID NO: 32376 - RNA, 21 nt, synthetic construct
  source 1..21: mol_type = other RNA
tctaccatggtgagtgcgggg

SEQ ID NO: 32377 - RNA, 21 nt, synthetic construct
  source 1..21: mol_type = other RNA
tctccactctgccccatgggc

SEQ ID NO: 32378 - RNA, 21 nt, synthetic construct
  source 1..21: mol_type = other RNA
tctccagtatattcatctacc

SEQ ID NO: 32379 - RNA, 21 nt, synthetic construct
  source 1..21: mol_type = other RNA
tctccagttcctcgttgagct

SEQ ID NO: 32380 - RNA, 21 nt, synthetic construct
  source 1..21: mol_type = other RNA
tctccctgagggacccatcca

SEQ ID NO: 32381 - RNA, 21 nt, synthetic construct
  source 1..21: mol_type = other RNA
tctctgaggctggaacagggg

SEQ ID NO: 32382 - RNA, 21 nt, synthetic construct
  source 1..21: mol_type = other RNA
tctcttgcagtgcctttctcc

SEQ ID NO: 32383 - RNA, 21 nt, synthetic construct
  source 1..21: mol_type = other RNA
tctgaggctggaacaggggtc

SEQ ID NO: 32384 - RNA, 21 nt, synthetic construct
  source 1..21: mol_type = other RNA
tctgccccatgggctctggca

SEQ ID NO: 32385 - RNA, 21 nt, synthetic construct
  source 1..21: mol_type = other RNA
tctggcaaatctctgaggctg

SEQ ID NO: 32386 - RNA, 21 nt, synthetic construct
  source 1..21: mol_type = other RNA
tcttgcagtgcctttctccag

SEQ ID NO: 32387 - RNA, 21 nt, synthetic construct
  source 1..21: mol_type = other RNA
tgaatatactggagacccctg

SEQ ID NO: 32388 - RNA, 21 nt, synthetic construct
  source 1..21: mol_type = other RNA
tgaatctccctgagggaccca

SEQ ID NO: 32389 - RNA, 21 nt, synthetic construct
  source 1..21: mol_type = other RNA
tgagctgcctgaatctccctg

SEQ ID NO: 32390 - RNA, 21 nt, synthetic construct
  source 1..21: mol_type = other RNA
tgaggctggaacaggggtctc

SEQ ID NO: 32391 - RNA, 21 nt, synthetic construct
  source 1..21: mol_type = other RNA
tgagggacccatccagtttgt

SEQ ID NO: 32392 - RNA, 21 nt, synthetic construct
  source 1..21: mol_type = other RNA
tgagtgcggggcctggctccc

SEQ ID NO: 32393 - RNA, 21 nt, synthetic construct
  source 1..21: mol_type = other RNA
tgcaagagacaaaggcagtga

SEQ ID NO: 32394 - RNA, 21 nt, synthetic construct
  source 1..21: mol_type = other RNA
tgcaagatcccacctcactgc

SEQ ID NO: 32395 - RNA, 21 nt, synthetic construct
  source 1..21: mol_type = other RNA
tgcagtgcctttctccagttc

SEQ ID NO: 32396 - RNA, 21 nt, synthetic construct
  source 1..21: mol_type = other RNA
tgccagagcccatggggcaga

SEQ ID NO: 32397 - RNA, 21 nt, synthetic construct
  source 1..21: mol_type = other RNA
tgccccatgggctctggcaaa

SEQ ID NO: 32398 - RNA, 21 nt, synthetic construct
  source 1..21: mol_type = other RNA
tgcctgaatctccctgaggga

SEQ ID NO: 32399 - RNA, 21 nt, synthetic construct
  source 1..21: mol_type = other RNA
tgcctttctccagttcctcgt

SEQ ID NO: 32400 - RNA, 21 nt, synthetic construct
  source 1..21: mol_type = other RNA
tgcctttgtctcttgcagtgc

SEQ ID NO: 32401 - RNA, 21 nt, synthetic construct
  source 1..21: mol_type = other RNA
tgctatgcaagatcccacctc

SEQ ID NO: 32402 - RNA, 21 nt, synthetic construct
  source 1..21: mol_type = other RNA
tggaacaggggtctccagtat

SEQ ID NO: 32403 - RNA, 21 nt, synthetic construct
  source 1..21: mol_type = other RNA
tggagaaaggcactgcaagag

SEQ ID NO: 32404 - RNA, 21 nt, synthetic construct
  source 1..21: mol_type = other RNA
tggagacccctgttccagcct

SEQ ID NO: 32405 - RNA, 21 nt, synthetic construct
  source 1..21: mol_type = other RNA
tggagatggtggggacaaact

SEQ ID NO: 32406 - RNA, 21 nt, synthetic construct
  source 1..21: mol_type = other RNA
tggatgggtccctcagggaga

SEQ ID NO: 32407 - RNA, 21 nt, synthetic construct
  source 1..21: mol_type = other RNA
tggcaaatctctgaggctgga

SEQ ID NO: 32408 - RNA, 21 nt, synthetic construct
  source 1..21: mol_type = other RNA
tggctccccgaccacctctcc

SEQ ID NO: 32409 - RNA, 21 nt, synthetic construct
  source 1..21: mol_type = other RNA
tgggctctggcaaatctctga

SEQ ID NO: 32410 - RNA, 21 nt, synthetic construct
  source 1..21: mol_type = other RNA
tggggacaaactggatgggtc

SEQ ID NO: 32411 - RNA, 21 nt, synthetic construct
  source 1..21: mol_type = other RNA
tggggcagagtggagatggtg

SEQ ID NO: 32412 - RNA, 21 nt, synthetic construct
  source 1..21: mol_type = other RNA
tgggtccctcagggagattca

SEQ ID NO: 32413 - RNA, 21 nt, synthetic construct
  source 1..21: mol_type = other RNA
tggtagatgaatatactggag

SEQ ID NO: 32414 - RNA, 21 nt, synthetic construct
  source 1..21: mol_type = other RNA
tggtgagtgcggggcctggct

SEQ ID NO: 32415 - RNA, 21 nt, synthetic construct
  source 1..21: mol_type = other RNA
tggtggggacaaactggatgg

SEQ ID NO: 32416 - RNA, 21 nt, synthetic construct
  source 1..21: mol_type = other RNA
tgtccccaccatctccactct

SEQ ID NO: 32417 - RNA, 21 nt, synthetic construct
  source 1..21: mol_type = other RNA
tgtctcttgcagtgcctttct

SEQ ID NO: 32418 - RNA, 21 nt, synthetic construct
  source 1..21: mol_type = other RNA
tgttccagcctcagagatttg

SEQ ID NO: 32419 - RNA, 21 nt, synthetic construct
  source 1..21: mol_type = other RNA
ttcaggcagctcaacgaggaa

SEQ ID NO: 32420 - RNA, 21 nt, synthetic construct
  source 1..21: mol_type = other RNA
ttcatctaccatggtgagtgc

SEQ ID NO: 32421 - RNA, 21 nt, synthetic construct
  source 1..21: mol_type = other RNA
ttccagcctcagagatttgcc

SEQ ID NO: 32422 - RNA, 21 nt, synthetic construct
  source 1..21: mol_type = other RNA
ttcctcgttgagctgcctgaa

SEQ ID NO: 32423 - RNA, 21 nt, synthetic construct
  source 1..21: mol_type = other RNA
ttctccagttcctcgttgagc

SEQ ID NO: 32424 - RNA, 21 nt, synthetic construct
  source 1..21: mol_type = other RNA
ttgagctgcctgaatctccct

SEQ ID NO: 32425 - RNA, 21 nt, synthetic construct
  source 1..21: mol_type = other RNA
ttgcagtgcctttctccagtt

SEQ ID NO: 32426 - RNA, 21 nt, synthetic construct
  source 1..21: mol_type = other RNA
ttgccagagcccatggggcag

SEQ ID NO: 32427 - RNA, 21 nt, synthetic construct
  source 1..21: mol_type = other RNA
ttgtccccaccatctccactc

SEQ ID NO: 32428 - RNA, 21 nt, synthetic construct
  source 1..21: mol_type = other RNA
ttgtctcttgcagtgcctttc

SEQ ID NO: 32429 - RNA, 21 nt, synthetic construct
  source 1..21: mol_type = other RNA
tttctccagttcctcgttgag

SEQ ID NO: 32430 - RNA, 21 nt, synthetic construct
  source 1..21: mol_type = other RNA
tttgccagagcccatggggca

SEQ ID NO: 32431 - RNA, 21 nt, synthetic construct
  source 1..21: mol_type = other RNA
tttgtccccaccatctccact

SEQ ID NO: 32432 - RNA, 21 nt, synthetic construct
  source 1..21: mol_type = other RNA
tttgtctcttgcagtgccttt

SEQ ID NO: 32433 - RNA, 22 nt, synthetic construct
  source 1..22: mol_type = other RNA
aaactggatgggtccctcaggg

SEQ ID NO: 32434 - RNA, 22 nt, synthetic construct
  source 1..22: mol_type = other RNA
aaaggcactgcaagagacaaag

SEQ ID NO: 32435 - RNA, 22 nt, synthetic construct
  source 1..22: mol_type = other RNA
aaaggcagtgaggtgggatctt

SEQ ID NO: 32436 - RNA, 22 nt, synthetic construct
  source 1..22: mol_type = other RNA
aaatctctgaggctggaacagg

SEQ ID NO: 32437 - RNA, 22 nt, synthetic construct
  source 1..22: mol_type = other RNA
aacaggggtctccagtatattc

SEQ ID NO: 32438 - RNA, 22 nt, synthetic construct
  source 1..22: mol_type = other RNA
aacgaggaactggagaaaggca

SEQ ID NO: 32439 - RNA, 22 nt, synthetic construct
  source 1..22: mol_type = other RNA
aactggagaaaggcactgcaag

SEQ ID NO: 32440 - RNA, 22 nt, synthetic construct
  source 1..22: mol_type = other RNA
aactggatgggtccctcaggga

SEQ ID NO: 32441 - RNA, 22 nt, synthetic construct
  source 1..22: mol_type = other RNA
aagagacaaaggcagtgaggtg

SEQ ID NO: 32442 - RNA, 22 nt, synthetic construct
  source 1..22: mol_type = other RNA
aagatcccacctcactgccttt

SEQ ID NO: 32443 - RNA, 22 nt, synthetic construct
  source 1..22: mol_type = other RNA
aaggcactgcaagagacaaagg

SEQ ID NO: 32444 - RNA, 22 nt, synthetic construct
  source 1..22: mol_type = other RNA
aaggcagtgaggtgggatcttg

SEQ ID NO: 32445 - RNA, 22 nt, synthetic construct
  source 1..22: mol_type = other RNA
aatatactggagacccctgttc

SEQ ID NO: 32446 - RNA, 22 nt, synthetic construct
  source 1..22: mol_type = other RNA
aatctccctgagggacccatcc

SEQ ID NO: 32447 - RNA, 22 nt, synthetic construct
  source 1..22: mol_type = other RNA
aatctctgaggctggaacaggg

SEQ ID NO: 32448 - RNA, 22 nt, synthetic construct
  source 1..22: mol_type = other RNA
acaaactggatgggtccctcag

SEQ ID NO: 32449 - RNA, 22 nt, synthetic construct
  source 1..22: mol_type = other RNA
acaaaggcagtgaggtgggatc

SEQ ID NO: 32450 - RNA, 22 nt, synthetic construct
  source 1..22: mol_type = other RNA
acaggggtctccagtatattca

SEQ ID NO: 32451 - RNA, 22 nt, synthetic construct
  source 1..22: mol_type = other RNA
acaggtgctatgcaagatccca

SEQ ID NO: 32452 - RNA, 22 nt, synthetic construct
  source 1..22: mol_type = other RNA
accatctccactctgccccatg

SEQ ID NO: 32453 - RNA, 22 nt, synthetic construct
  source 1..22: mol_type = other RNA
accatggtagatgaatatactg

SEQ ID NO: 32454 - RNA, 22 nt, synthetic construct
  source 1..22: mol_type = other RNA
accatggtgagtgcggggcctg

SEQ ID NO: 32455 - RNA, 22 nt, synthetic construct
  source 1..22: mol_type = other RNA
acccatccagtttgtccccacc

SEQ ID NO: 32456 - RNA, 22 nt, synthetic construct
  source 1..22: mol_type = other RNA
acccctgttccagcctcagaga

SEQ ID NO: 32457 - RNA, 22 nt, synthetic construct
  source 1..22: mol_type = other RNA
acctcactgcctttgtctcttg

SEQ ID NO: 32458 - RNA, 22 nt, synthetic construct
  source 1..22: mol_type = other RNA
acgaggaactggagaaaggcac

SEQ ID NO: 32459 - RNA, 22 nt, synthetic construct
  source 1..22: mol_type = other RNA
actcaccatggtagatgaatat

SEQ ID NO: 32460 - RNA, 22 nt, synthetic construct
  source 1..22: mol_type = other RNA
actctgccccatgggctctggc

SEQ ID NO: 32461 - RNA, 22 nt, synthetic construct
  source 1..22: mol_type = other RNA
actgcaagagacaaaggcagtg

SEQ ID NO: 32462 - RNA, 22 nt, synthetic construct
  source 1..22: mol_type = other RNA
actgcctttgtctcttgcagtg

SEQ ID NO: 32463 - RNA, 22 nt, synthetic construct
  source 1..22: mol_type = other RNA
actggagaaaggcactgcaaga

SEQ ID NO: 32464 - RNA, 22 nt, synthetic construct
  source 1..22: mol_type = other RNA
actggagacccctgttccagcc

SEQ ID NO: 32465 - RNA, 22 nt, synthetic construct
  source 1..22: mol_type = other RNA
actggatgggtccctcagggag

SEQ ID NO: 32466 - RNA, 22 nt, synthetic construct
  source 1..22: mol_type = other RNA
agaaaggcactgcaagagacaa

SEQ ID NO: 32467 - RNA, 22 nt, synthetic construct
  source 1..22: mol_type = other RNA
agacaaaggcagtgaggtggga

SEQ ID NO: 32468 - RNA, 22 nt, synthetic construct
  source 1..22: mol_type = other RNA
agacccctgttccagcctcaga

SEQ ID NO: 32469 - RNA, 22 nt, synthetic construct
  source 1..22: mol_type = other RNA
agagacaaaggcagtgaggtgg

SEQ ID NO: 32470 - RNA, 22 nt, synthetic construct
  source 1..22: mol_type = other RNA
agagatttgccagagcccatgg

SEQ ID NO: 32471 - RNA, 22 nt, synthetic construct
  source 1..22: mol_type = other RNA
agagcccatggggcagagtgga

SEQ ID NO: 32472 - RNA, 22 nt, synthetic construct
  source 1..22: mol_type = other RNA
agaggtggtcggggagccaggc

SEQ ID NO: 32473 - RNA, 22 nt, synthetic construct
  source 1..22: mol_type = other RNA
agagtggagatggtggggacaa

SEQ ID NO: 32474 - RNA, 22 nt, synthetic construct
  source 1..22: mol_type = other RNA
agatcccacctcactgcctttg

SEQ ID NO: 32475 - RNA, 22 nt, synthetic construct
  source 1..22: mol_type = other RNA
agatgaatatactggagacccc

SEQ ID NO: 32476 - RNA, 22 nt, synthetic construct
  source 1..22: mol_type = other RNA
agatggtggggacaaactggat

SEQ ID NO: 32477 - RNA, 22 nt, synthetic construct
  source 1..22: mol_type = other RNA
agattcaggcagctcaacgagg

SEQ ID NO: 32478 - RNA, 22 nt, synthetic construct
  source 1..22: mol_type = other RNA
agatttgccagagcccatgggg

SEQ ID NO: 32479 - RNA, 22 nt, synthetic construct
  source 1..22: mol_type = other RNA
agccaggccccgcactcaccat

SEQ ID NO: 32480 - RNA, 22 nt, synthetic construct
  source 1..22: mol_type = other RNA
agcccatggggcagagtggaga

SEQ ID NO: 32481 - RNA, 22 nt, synthetic construct
  source 1..22: mol_type = other RNA
agcctcagagatttgccagagc

SEQ ID NO: 32482 - RNA, 22 nt, synthetic construct
  source 1..22: mol_type = other RNA
agctcaacgaggaactggagaa

SEQ ID NO: 32483 - RNA, 22 nt, synthetic construct
  source 1..22: mol_type = other RNA
agctgcctgaatctccctgagg

SEQ ID NO: 32484 - RNA, 22 nt, synthetic construct
  source 1..22: mol_type = other RNA
aggaactggagaaaggcactgc

SEQ ID NO: 32485 - RNA, 22 nt, synthetic construct
  source 1..22: mol_type = other RNA
aggagggagaggtggtcgggga

SEQ ID NO: 32486 - RNA, 22 nt, synthetic construct
  source 1..22: mol_type = other RNA
aggcactgcaagagacaaaggc

SEQ ID NO: 32487 - RNA, 22 nt, synthetic construct
  source 1..22: mol_type = other RNA
aggcagctcaacgaggaactgg

SEQ ID NO: 32488 - RNA, 22 nt, synthetic construct
  source 1..22: mol_type = other RNA
aggcagtgaggtgggatcttgc

SEQ ID NO: 32489 - RNA, 22 nt, synthetic construct
  source 1..22: mol_type = other RNA
aggccccgcactcaccatggta

SEQ ID NO: 32490 - RNA, 22 nt, synthetic construct
  source 1..22: mol_type = other RNA
aggctggaacaggggtctccag

SEQ ID NO: 32491 - RNA, 22 nt, synthetic construct
  source 1..22: mol_type = other RNA
agggacccatccagtttgtccc

SEQ ID NO: 32492 - RNA, 22 nt, synthetic construct
  source 1..22: mol_type = other RNA
agggagaggtggtcggggagcc

SEQ ID NO: 32493 - RNA, 22 nt, synthetic construct
  source 1..22: mol_type = other RNA
agggagattcaggcagctcaac

SEQ ID NO: 32494 - RNA, 22 nt, synthetic construct
  source 1..22: mol_type = other RNA
aggggtctccagtatattcatc

SEQ ID NO: 32495 - RNA, 22 nt, synthetic construct
  source 1..22: mol_type = other RNA
aggtaggagggagaggtggtcg

SEQ ID NO: 32496 - RNA, 22 nt, synthetic construct
  source 1..22: mol_type = other RNA
aggtgctatgcaagatcccacc

SEQ ID NO: 32497 - RNA, 22 nt, synthetic construct
  source 1..22: mol_type = other RNA
aggtggtcggggagccaggccc

SEQ ID NO: 32498 - RNA, 22 nt, synthetic construct
  source 1..22: mol_type = other RNA
agtatattcatctaccatggtg

SEQ ID NO: 32499 - RNA, 22 nt, synthetic construct
  source 1..22: mol_type = other RNA
agtgcctttctccagttcctcg

SEQ ID NO: 32500 - RNA, 22 nt, synthetic construct
  source 1..22: mol_type = other RNA
agtgcggggcctggctccccga

SEQ ID NO: 32501 - RNA, 22 nt, synthetic construct
  source 1..22: mol_type = other RNA
agtggagatggtggggacaaac

SEQ ID NO: 32502 - RNA, 22 nt, synthetic construct
  source 1..22: mol_type = other RNA
agttcctcgttgagctgcctga

SEQ ID NO: 32503 - RNA, 22 nt, synthetic construct
  source 1..22: mol_type = other RNA
agtttgtccccaccatctccac

SEQ ID NO: 32504 - RNA, 22 nt, synthetic construct
  source 1..22: mol_type = other RNA
atactggagacccctgttccag

SEQ ID NO: 32505 - RNA, 22 nt, synthetic construct
  source 1..22: mol_type = other RNA
atatactggagacccctgttcc

SEQ ID NO: 32506 - RNA, 22 nt, synthetic construct
  source 1..22: mol_type = other RNA
atattcatctaccatggtgagt

SEQ ID NO: 32507 - RNA, 22 nt, synthetic construct
  source 1..22: mol_type = other RNA
atccagtttgtccccaccatct

SEQ ID NO: 32508 - RNA, 22 nt, synthetic construct
  source 1..22: mol_type = other RNA
atcccacctcactgcctttgtc

SEQ ID NO: 32509 - RNA, 22 nt, synthetic construct
  source 1..22: mol_type = other RNA
atctaccatggtgagtgcgggg

SEQ ID NO: 32510 - RNA, 22 nt, synthetic construct
  source 1..22: mol_type = other RNA
atctccactctgccccatgggc

SEQ ID NO: 32511 - RNA, 22 nt, synthetic construct
  source 1..22: mol_type = other RNA
atctccctgagggacccatcca

SEQ ID NO: 32512 - RNA, 22 nt, synthetic construct
  source 1..22: mol_type = other RNA
atctctgaggctggaacagggg

SEQ ID NO: 32513 - RNA, 22 nt, synthetic construct
  source 1..22: mol_type = other RNA
atgaatatactggagacccctg

SEQ ID NO: 32514 - RNA, 22 nt, synthetic construct
  source 1..22: mol_type = other RNA
atgcaagatcccacctcactgc

SEQ ID NO: 32515 - RNA, 22 nt, synthetic construct
  source 1..22: mol_type = other RNA
atgggctctggcaaatctctga

SEQ ID NO: 32516 - RNA, 22 nt, synthetic construct
  source 1..22: mol_type = other RNA
atggggcagagtggagatggtg

SEQ ID NO: 32517 - RNA, 22 nt, synthetic construct
  source 1..22: mol_type = other RNA
atgggtccctcagggagattca

SEQ ID NO: 32518 - RNA, 22 nt, synthetic construct
  source 1..22: mol_type = other RNA
atggtagatgaatatactggag

SEQ ID NO: 32519 - RNA, 22 nt, synthetic construct
  source 1..22: mol_type = other RNA
atggtgagtgcggggcctggct

SEQ ID NO: 32520 - RNA, 22 nt, synthetic construct
  source 1..22: mol_type = other RNA
atggtggggacaaactggatgg

SEQ ID NO: 32521 - RNA, 22 nt, synthetic construct
  source 1..22: mol_type = other RNA
attcaggcagctcaacgaggaa

SEQ ID NO: 32522 - RNA, 22 nt, synthetic construct
  source 1..22: mol_type = other RNA
attcatctaccatggtgagtgc

SEQ ID NO: 32523 - RNA, 22 nt, synthetic construct
  source 1..22: mol_type = other RNA
atttgccagagcccatggggca

SEQ ID NO: 32524 - RNA, 22 nt, synthetic construct
  source 1..22: mol_type = other RNA
caaactggatgggtccctcagg

SEQ ID NO: 32525 - RNA, 22 nt, synthetic construct
  source 1..22: mol_type = other RNA
caaaggcagtgaggtgggatct

SEQ ID NO: 32526 - RNA, 22 nt, synthetic construct
  source 1..22: mol_type = other RNA
caaatctctgaggctggaacag

SEQ ID NO: 32527 - RNA, 22 nt, synthetic construct
  source 1..22: mol_type = other RNA
caacgaggaactggagaaaggc

SEQ ID NO: 32528 - RNA, 22 nt, synthetic construct
  source 1..22: mol_type = other RNA
caagagacaaaggcagtgaggt

SEQ ID NO: 32529 - RNA, 22 nt, synthetic construct
  source 1..22: mol_type = other RNA
caagatcccacctcactgcctt

SEQ ID NO: 32530 - RNA, 22 nt, synthetic construct
  source 1..22: mol_type = other RNA
caccatctccactctgccccat

SEQ ID NO: 32531 - RNA, 22 nt, synthetic construct
  source 1..22: mol_type = other RNA
caccatggtagatgaatatact

SEQ ID NO: 32532 - RNA, 22 nt, synthetic construct
  source 1..22: mol_type = other RNA
cacctcactgcctttgtctctt

SEQ ID NO: 32533 - RNA, 22 nt, synthetic construct
  source 1..22: mol_type = other RNA
cactcaccatggtagatgaata

SEQ ID NO: 32534 - RNA, 22 nt, synthetic construct
  source 1..22: mol_type = other RNA
cactctgccccatgggctctgg

SEQ ID NO: 32535 - RNA, 22 nt, synthetic construct
  source 1..22: mol_type = other RNA
cactgcaagagacaaaggcagt

SEQ ID NO: 32536 - RNA, 22 nt, synthetic construct
  source 1..22: mol_type = other RNA
cactgcctttgtctcttgcagt

SEQ ID NO: 32537 - RNA, 22 nt, synthetic construct
  source 1..22: mol_type = other RNA
cagagatttgccagagcccatg

SEQ ID NO: 32538 - RNA, 22 nt, synthetic construct
  source 1..22: mol_type = other RNA
cagagcccatggggcagagtgg

SEQ ID NO: 32539 - RNA, 22 nt, synthetic construct
  source 1..22: mol_type = other RNA
cagagtggagatggtggggaca

SEQ ID NO: 32540 - RNA, 22 nt, synthetic construct
  source 1..22: mol_type = other RNA
cagcctcagagatttgccagag

SEQ ID NO: 32541 - RNA, 22 nt, synthetic construct
  source 1..22: mol_type = other RNA
cagctcaacgaggaactggaga

SEQ ID NO: 32542 - RNA, 22 nt, synthetic construct
  source 1..22: mol_type = other RNA
caggcagctcaacgaggaactg

SEQ ID NO: 32543 - RNA, 22 nt, synthetic construct
  source 1..22: mol_type = other RNA
caggccccgcactcaccatggt

SEQ ID NO: 32544 - RNA, 22 nt, synthetic construct
  source 1..22: mol_type = other RNA
cagggagattcaggcagctcaa

SEQ ID NO: 32545 - RNA, 22 nt, synthetic construct
  source 1..22: mol_type = other RNA
caggggtctccagtatattcat

SEQ ID NO: 32546 - RNA, 22 nt, synthetic construct
  source 1..22: mol_type = other RNA
caggtaggagggagaggtggtc

SEQ ID NO: 32547 - RNA, 22 nt, synthetic construct
  source 1..22: mol_type = other RNA
caggtgctatgcaagatcccac

SEQ ID NO: 32548 - RNA, 22 nt, synthetic construct
  source 1..22: mol_type = other RNA
cagtatattcatctaccatggt

SEQ ID NO: 32549 - RNA, 22 nt, synthetic construct
  source 1..22: mol_type = other RNA
cagtgaggtgggatcttgcata

SEQ ID NO: 32550 - RNA, 22 nt, synthetic construct
  source 1..22: mol_type = other RNA
cagtgcctttctccagttcctc

SEQ ID NO: 32551 - RNA, 22 nt, synthetic construct
  source 1..22: mol_type = other RNA
cagttcctcgttgagctgcctg

SEQ ID NO: 32552 - RNA, 22 nt, synthetic construct
  source 1..22: mol_type = other RNA
cagtttgtccccaccatctcca

SEQ ID NO: 32553 - RNA, 22 nt, synthetic construct
  source 1..22: mol_type = other RNA
catccagtttgtccccaccatc

SEQ ID NO: 32554 - RNA, 22 nt, synthetic construct
  source 1..22: mol_type = other RNA
catctaccatggtgagtgcggg

SEQ ID NO: 32555 - RNA, 22 nt, synthetic construct
  source 1..22: mol_type = other RNA
catctccactctgccccatggg

SEQ ID NO: 32556 - RNA, 22 nt, synthetic construct
  source 1..22: mol_type = other RNA
catgggctctggcaaatctctg

SEQ ID NO: 32557 - RNA, 22 nt, synthetic construct
  source 1..22: mol_type = other RNA
catggggcagagtggagatggt

SEQ ID NO: 32558 - RNA, 22 nt, synthetic construct
  source 1..22: mol_type = other RNA
catggtagatgaatatactgga

SEQ ID NO: 32559 - RNA, 22 nt, synthetic construct
  source 1..22: mol_type = other RNA
catggtgagtgcggggcctggc

SEQ ID NO: 32560 - RNA, 22 nt, synthetic construct
  source 1..22: mol_type = other RNA
ccaccatctccactctgcccca

SEQ ID NO: 32561 - RNA, 22 nt, synthetic construct
  source 1..22: mol_type = other RNA
ccacctcactgcctttgtctct

SEQ ID NO: 32562 - RNA, 22 nt, synthetic construct
  source 1..22: mol_type = other RNA
ccactctgccccatgggctctg

SEQ ID NO: 32563 - RNA, 22 nt, synthetic construct
  source 1..22: mol_type = other RNA
ccagagcccatggggcagagtg

SEQ ID NO: 32564 - RNA, 22 nt, synthetic construct
  source 1..22: mol_type = other RNA
ccagcctcagagatttgccaga

SEQ ID NO: 32565 - RNA, 22 nt, synthetic construct
  source 1..22: mol_type = other RNA
ccaggccccgcactcaccatgg

SEQ ID NO: 32566 - RNA, 22 nt, synthetic construct
  source 1..22: mol_type = other RNA
ccagtatattcatctaccatgg

SEQ ID NO: 32567 - RNA, 22 nt, synthetic construct
  source 1..22: mol_type = other RNA
ccagttcctcgttgagctgcct

SEQ ID NO: 32568 - RNA, 22 nt, synthetic construct
  source 1..22: mol_type = other RNA
ccagtttgtccccaccatctcc

SEQ ID NO: 32569 - RNA, 22 nt, synthetic construct
  source 1..22: mol_type = other RNA
ccatccagtttgtccccaccat

SEQ ID NO: 32570 - RNA, 22 nt, synthetic construct
  source 1..22: mol_type = other RNA
ccatctccactctgccccatgg

SEQ ID NO: 32571 - RNA, 22 nt, synthetic construct
  source 1..22: mol_type = other RNA
ccatgggctctggcaaatctct

SEQ ID NO: 32572 - RNA, 22 nt, synthetic construct
  source 1..22: mol_type = other RNA
ccatggggcagagtggagatgg

SEQ ID NO: 32573 - RNA, 22 nt, synthetic construct
  source 1..22: mol_type = other RNA
ccatggtagatgaatatactgg

SEQ ID NO: 32574 - RNA, 22 nt, synthetic construct
  source 1..22: mol_type = other RNA
ccatggtgagtgcggggcctgg

SEQ ID NO: 32575 - RNA, 22 nt, synthetic construct
  source 1..22: mol_type = other RNA
cccaccatctccactctgcccc

SEQ ID NO: 32576 - RNA, 22 nt, synthetic construct
  source 1..22: mol_type = other RNA
cccacctcactgcctttgtctc

SEQ ID NO: 32577 - RNA, 22 nt, synthetic construct
  source 1..22: mol_type = other RNA
cccatccagtttgtccccacca

SEQ ID NO: 32578 - RNA, 22 nt, synthetic construct
  source 1..22: mol_type = other RNA
cccatgggctctggcaaatctc

SEQ ID NO: 32579 - RNA, 22 nt, synthetic construct
  source 1..22: mol_type = other RNA
cccatggggcagagtggagatg

SEQ ID NO: 32580 - RNA, 22 nt, synthetic construct
  source 1..22: mol_type = other RNA
ccccaccatctccactctgccc

SEQ ID NO: 32581 - RNA, 22 nt, synthetic construct
  source 1..22: mol_type = other RNA
ccccatgggctctggcaaatct

SEQ ID NO: 32582 - RNA, 22 nt, synthetic construct
  source 1..22: mol_type = other RNA
ccccgcactcaccatggtagat

SEQ ID NO: 32583 - RNA, 22 nt, synthetic construct
  source 1..22: mol_type = other RNA
cccctgttccagcctcagagat

SEQ ID NO: 32584 - RNA, 22 nt, synthetic construct
  source 1..22: mol_type = other RNA
cccgcactcaccatggtagatg

SEQ ID NO: 32585 - RNA, 22 nt, synthetic construct
  source 1..22: mol_type = other RNA
ccctcagggagattcaggcagc

SEQ ID NO: 32586 - RNA, 22 nt, synthetic construct
  source 1..22: mol_type = other RNA
ccctgagggacccatccagttt

SEQ ID NO: 32587 - RNA, 22 nt, synthetic construct
  source 1..22: mol_type = other RNA
ccctgttccagcctcagagatt

SEQ ID NO: 32588 - RNA, 22 nt, synthetic construct
  source 1..22: mol_type = other RNA
ccgcactcaccatggtagatga

SEQ ID NO: 32589 - RNA, 22 nt, synthetic construct
  source 1..22: mol_type = other RNA
cctcactgcctttgtctcttgc

SEQ ID NO: 32590 - RNA, 22 nt, synthetic construct
  source 1..22: mol_type = other RNA
cctcagagatttgccagagccc

SEQ ID NO: 32591 - RNA, 22 nt, synthetic construct
  source 1..22: mol_type = other RNA
cctcagggagattcaggcagct

SEQ ID NO: 32592 - RNA, 22 nt, synthetic construct
  source 1..22: mol_type = other RNA
cctcgttgagctgcctgaatct

SEQ ID NO: 32593 - RNA, 22 nt, synthetic construct
  source 1..22: mol_type = other RNA
cctgaatctccctgagggaccc

SEQ ID NO: 32594 - RNA, 22 nt, synthetic construct
  source 1..22: mol_type = other RNA
cctgagggacccatccagtttg

SEQ ID NO: 32595 - RNA, 22 nt, synthetic construct
  source 1..22: mol_type = other RNA
cctggctccccgaccacctctc

SEQ ID NO: 32596 - RNA, 22 nt, synthetic construct
  source 1..22: mol_type = other RNA
cctgttccagcctcagagattt

SEQ ID NO: 32597 - RNA, 22 nt, synthetic construct
  source 1..22: mol_type = other RNA
cctttctccagttcctcgttga

SEQ ID NO: 32598 - RNA, 22 nt, synthetic construct
  source 1..22: mol_type = other RNA
cctttgtctcttgcagtgcctt

SEQ ID NO: 32599 - RNA, 22 nt, synthetic construct
  source 1..22: mol_type = other RNA
cgaggaactggagaaaggcact

SEQ ID NO: 32600 - RNA, 22 nt, synthetic construct
  source 1..22: mol_type = other RNA
cgcactcaccatggtagatgaa

SEQ ID NO: 32601 - RNA, 22 nt, synthetic construct
  source 1..22: mol_type = other RNA
cgttgagctgcctgaatctccc

SEQ ID NO: 32602 - RNA, 22 nt, synthetic construct
  source 1..22: mol_type = other RNA
ctaccatggtgagtgcggggcc

SEQ ID NO: 32603 - RNA, 22 nt, synthetic construct
  source 1..22: mol_type = other RNA
ctatgcaagatcccacctcact

SEQ ID NO: 32604 - RNA, 22 nt, synthetic construct
  source 1..22: mol_type = other RNA
ctcaacgaggaactggagaaag

SEQ ID NO: 32605 - RNA, 22 nt, synthetic construct
  source 1..22: mol_type = other RNA
ctcaccatggtagatgaatata

SEQ ID NO: 32606 - RNA, 22 nt, synthetic construct
  source 1..22: mol_type = other RNA
ctcactgcctttgtctcttgca

SEQ ID NO: 32607 - RNA, 22 nt, synthetic construct
  source 1..22: mol_type = other RNA
ctcagagatttgccagagccca

SEQ ID NO: 32608 - RNA, 22 nt, synthetic construct
  source 1..22: mol_type = other RNA
ctcagggagattcaggcagctc

SEQ ID NO: 32609 - RNA, 22 nt, synthetic construct
  source 1..22: mol_type = other RNA
ctccactctgccccatgggctc

SEQ ID NO: 32610 - RNA, 22 nt, synthetic construct
  source 1..22: mol_type = other RNA
ctccagtatattcatctaccat

SEQ ID NO: 32611 - RNA, 22 nt, synthetic construct
  source 1..22: mol_type = other RNA
ctccagttcctcgttgagctgc

SEQ ID NO: 32612 - RNA, 22 nt, synthetic construct
  source 1..22: mol_type = other RNA
ctccctgagggacccatccagt

SEQ ID NO: 32613 - RNA, 22 nt, synthetic construct
  source 1..22: mol_type = other RNA
ctcgttgagctgcctgaatctc

SEQ ID NO: 32614 - RNA, 22 nt, synthetic construct
  source 1..22: mol_type = other RNA
ctctgaggctggaacaggggtc

SEQ ID NO: 32615 - RNA, 22 nt, synthetic construct
  source 1..22: mol_type = other RNA
ctctgccccatgggctctggca

SEQ ID NO: 32616 - RNA, 22 nt, synthetic construct
  source 1..22: mol_type = other RNA
ctctggcaaatctctgaggctg

SEQ ID NO: 32617 - RNA, 22 nt, synthetic construct
  source 1..22: mol_type = other RNA
ctcttgcagtgcctttctccag

SEQ ID NO: 32618 - RNA, 22 nt, synthetic construct
  source 1..22: mol_type = other RNA
ctgaatctccctgagggaccca

SEQ ID NO: 32619 - RNA, 22 nt, synthetic construct
  source 1..22: mol_type = other RNA
ctgaggctggaacaggggtctc

SEQ ID NO: 32620 - RNA, 22 nt, synthetic construct
  source 1..22: mol_type = other RNA
ctgagggacccatccagtttgt

SEQ ID NO: 32621 - RNA, 22 nt, synthetic construct
  source 1..22: mol_type = other RNA
ctgcaagagacaaaggcagtga

SEQ ID NO: 32622 - RNA, 22 nt, synthetic construct
  source 1..22: mol_type = other RNA
ctgccccatgggctctggcaaa

SEQ ID NO: 32623 - RNA, 22 nt, synthetic construct
  source 1..22: mol_type = other RNA
ctgcctgaatctccctgaggga

SEQ ID NO: 32624 - RNA, 22 nt, synthetic construct
  source 1..22: mol_type = other RNA
ctgcctttgtctcttgcagtgc

SEQ ID NO: 32625 - RNA, 22 nt, synthetic construct
  source 1..22: mol_type = other RNA
ctggaacaggggtctccagtat

SEQ ID NO: 32626 - RNA, 22 nt, synthetic construct
  source 1..22: mol_type = other RNA
ctggagaaaggcactgcaagag

SEQ ID NO: 32627 - RNA, 22 nt, synthetic construct
  source 1..22: mol_type = other RNA
ctggagacccctgttccagcct

SEQ ID NO: 32628 - RNA, 22 nt, synthetic construct
  source 1..22: mol_type = other RNA
ctggatgggtccctcagggaga

SEQ ID NO: 32629 - RNA, 22 nt, synthetic construct
  source 1..22: mol_type = other RNA
ctggcaaatctctgaggctgga

SEQ ID NO: 32630 - RNA, 22 nt, synthetic construct
  source 1..22: mol_type = other RNA
ctggctccccgaccacctctcc

SEQ ID NO: 32631 - RNA, 22 nt, synthetic construct
  source 1..22: mol_type = other RNA
ctgttccagcctcagagatttg

SEQ ID NO: 32632 - RNA, 22 nt, synthetic construct
  source 1..22: mol_type = other RNA
cttgcagtgcctttctccagtt

SEQ ID NO: 32633 - RNA, 22 nt, synthetic construct
  source 1..22: mol_type = other RNA
ctttctccagttcctcgttgag

SEQ ID NO: 32634 - RNA, 22 nt, synthetic construct
  source 1..22: mol_type = other RNA
ctttgtctcttgcagtgccttt

SEQ ID NO: 32635 - RNA, 22 nt, synthetic construct
  source 1..22: mol_type = other RNA
gaaaggcactgcaagagacaaa

SEQ ID NO: 32636 - RNA, 22 nt, synthetic construct
  source 1..22: mol_type = other RNA
gaacaggggtctccagtatatt

SEQ ID NO: 32637 - RNA, 22 nt, synthetic construct
  source 1..22: mol_type = other RNA
gaactggagaaaggcactgcaa

SEQ ID NO: 32638 - RNA, 22 nt, synthetic construct
  source 1..22: mol_type = other RNA
gaatatactggagacccctgtt

SEQ ID NO: 32639 - RNA, 22 nt, synthetic construct
  source 1..22: mol_type = other RNA
gaatctccctgagggacccatc

SEQ ID NO: 32640 - RNA, 22 nt, synthetic construct
  source 1..22: mol_type = other RNA
gacaaactggatgggtccctca

SEQ ID NO: 32641 - RNA, 22 nt, synthetic construct
  source 1..22: mol_type = other RNA
gacaaaggcagtgaggtgggat

SEQ ID NO: 32642 - RNA, 22 nt, synthetic construct
  source 1..22: mol_type = other RNA
gacccatccagtttgtccccac

SEQ ID NO: 32643 - RNA, 22 nt, synthetic construct
  source 1..22: mol_type = other RNA
gacccctgttccagcctcagag

SEQ ID NO: 32644 - RNA, 22 nt, synthetic construct
  source 1..22: mol_type = other RNA
gagaaaggcactgcaagagaca

SEQ ID NO: 32645 - RNA, 22 nt, synthetic construct
  source 1..22: mol_type = other RNA
gagacaaaggcagtgaggtggg

SEQ ID NO: 32646 - RNA, 22 nt, synthetic construct
  source 1..22: mol_type = other RNA
gagacccctgttccagcctcag

SEQ ID NO: 32647 - RNA, 22 nt, synthetic construct
  source 1..22: mol_type = other RNA
gagaggtggtcggggagccagg

SEQ ID NO: 32648 - RNA, 22 nt, synthetic construct
  source 1..22: mol_type = other RNA
gagatggtggggacaaactgga

SEQ ID NO: 32649 - RNA, 22 nt, synthetic construct
  source 1..22: mol_type = other RNA
gagattcaggcagctcaacgag

SEQ ID NO: 32650 - RNA, 22 nt, synthetic construct
  source 1..22: mol_type = other RNA
gagatttgccagagcccatggg

SEQ ID NO: 32651 - RNA, 22 nt, synthetic construct
  source 1..22: mol_type = other RNA
gagccaggccccgcactcacca

SEQ ID NO: 32652 - RNA, 22 nt, synthetic construct
  source 1..22: mol_type = other RNA
gagcccatggggcagagtggag

SEQ ID NO: 32653 - RNA, 22 nt, synthetic construct
  source 1..22: mol_type = other RNA
gagctgcctgaatctccctgag

SEQ ID NO: 32654 - RNA, 22 nt, synthetic construct
  source 1..22: mol_type = other RNA
gaggaactggagaaaggcactg

SEQ ID NO: 32655 - RNA, 22 nt, synthetic construct
  source 1..22: mol_type = other RNA
gaggctggaacaggggtctcca

SEQ ID NO: 32656 - RNA, 22 nt, synthetic construct
  source 1..22: mol_type = other RNA
gagggacccatccagtttgtcc

SEQ ID NO: 32657 - RNA, 22 nt, synthetic construct
  source 1..22: mol_type = other RNA
gagggagaggtggtcggggagc

SEQ ID NO: 32658 - RNA, 22 nt, synthetic construct
  source 1..22: mol_type = other RNA
gaggtggtcggggagccaggcc

SEQ ID NO: 32659 - RNA, 22 nt, synthetic construct
  source 1..22: mol_type = other RNA
gagtggagatggtggggacaaa

SEQ ID NO: 32660 - RNA, 22 nt, synthetic construct
  source 1..22: mol_type = other RNA
gatcccacctcactgcctttgt

SEQ ID NO: 32661 - RNA, 22 nt, synthetic construct
  source 1..22: mol_type = other RNA
gatgaatatactggagacccct

SEQ ID NO: 32662 - RNA, 22 nt, synthetic construct
  source 1..22: mol_type = other RNA
gatgggtccctcagggagattc

SEQ ID NO: 32663 - RNA, 22 nt, synthetic construct
  source 1..22: mol_type = other RNA
gatggtggggacaaactggatg

SEQ ID NO: 32664 - RNA, 22 nt, synthetic construct
  source 1..22: mol_type = other RNA
gattcaggcagctcaacgagga

SEQ ID NO: 32665 - RNA, 22 nt, synthetic construct
  source 1..22: mol_type = other RNA
gatttgccagagcccatggggc

SEQ ID NO: 32666 - RNA, 22 nt, synthetic construct
  source 1..22: mol_type = other RNA
gcaaatctctgaggctggaaca

SEQ ID NO: 32667 - RNA, 22 nt, synthetic construct
  source 1..22: mol_type = other RNA
gcaagagacaaaggcagtgagg

SEQ ID NO: 32668 - RNA, 22 nt, synthetic construct
  source 1..22: mol_type = other RNA
gcaagatcccacctcactgcct

SEQ ID NO: 32669 - RNA, 22 nt, synthetic construct
  source 1..22: mol_type = other RNA
gcactcaccatggtagatgaat

SEQ ID NO: 32670 - RNA, 22 nt, synthetic construct
  source 1..22: mol_type = other RNA
gcactgcaagagacaaaggcag

SEQ ID NO: 32671 - RNA, 22 nt, synthetic construct
  source 1..22: mol_type = other RNA
gcagagtggagatggtggggac

SEQ ID NO: 32672 - RNA, 22 nt, synthetic construct
  source 1..22: mol_type = other RNA
gcagctcaacgaggaactggag

SEQ ID NO: 32673 - RNA, 22 nt, synthetic construct
  source 1..22: mol_type = other RNA
gcagtgaggtgggatcttgcat

SEQ ID NO: 32674 - RNA, 22 nt, synthetic construct
  source 1..22: mol_type = other RNA
gcagtgcctttctccagttcct

SEQ ID NO: 32675 - RNA, 22 nt, synthetic construct
  source 1..22: mol_type = other RNA
gccagagcccatggggcagagt

SEQ ID NO: 32676 - RNA, 22 nt, synthetic construct
  source 1..22: mol_type = other RNA
gccaggccccgcactcaccatg

SEQ ID NO: 32677 - RNA, 22 nt, synthetic construct
  source 1..22: mol_type = other RNA
gcccatggggcagagtggagat

SEQ ID NO: 32678 - RNA, 22 nt, synthetic construct
  source 1..22: mol_type = other RNA
gccccatgggctctggcaaatc

SEQ ID NO: 32679 - RNA, 22 nt, synthetic construct
  source 1..22: mol_type = other RNA
gccccgcactcaccatggtaga

SEQ ID NO: 32680 - RNA, 22 nt, synthetic construct
  source 1..22: mol_type = other RNA
gcctcagagatttgccagagcc

SEQ ID NO: 32681 - RNA, 22 nt, synthetic construct
  source 1..22: mol_type = other RNA
gcctgaatctccctgagggacc

SEQ ID NO: 32682 - RNA, 22 nt, synthetic construct
  source 1..22: mol_type = other RNA
gcctggctccccgaccacctct

SEQ ID NO: 32683 - RNA, 22 nt, synthetic construct
  source 1..22: mol_type = other RNA
gcctttctccagttcctcgttg

SEQ ID NO: 32684 - RNA, 22 nt, synthetic construct
  source 1..22: mol_type = other RNA
gcctttgtctcttgcagtgcct

SEQ ID NO: 32685 - RNA, 22 nt, synthetic construct
  source 1..22: mol_type = other RNA
gctatgcaagatcccacctcac

SEQ ID NO: 32686 - RNA, 22 nt, synthetic construct
  source 1..22: mol_type = other RNA
gctcaacgaggaactggagaaa

SEQ ID NO: 32687 - RNA, 22 nt, synthetic construct
  source 1..22: mol_type = other RNA
gctctggcaaatctctgaggct

SEQ ID NO: 32688 - RNA, 22 nt, synthetic construct
  source 1..22: mol_type = other RNA
gctgcctgaatctccctgaggg

SEQ ID NO: 32689 - RNA, 22 nt, synthetic construct
  source 1..22: mol_type = other RNA
gctggaacaggggtctccagta

SEQ ID NO: 32690 - RNA, 22 nt, synthetic construct
  source 1..22: mol_type = other RNA
ggaacaggggtctccagtatat

SEQ ID NO: 32691 - RNA, 22 nt, synthetic construct
  source 1..22: mol_type = other RNA
ggaactggagaaaggcactgca

SEQ ID NO: 32692 - RNA, 22 nt, synthetic construct
  source 1..22: mol_type = other RNA
ggacaaactggatgggtccctc

SEQ ID NO: 32693 - RNA, 22 nt, synthetic construct
  source 1..22: mol_type = other RNA
ggacccatccagtttgtcccca

SEQ ID NO: 32694 - RNA, 22 nt, synthetic construct
  source 1..22: mol_type = other RNA
ggagaaaggcactgcaagagac

SEQ ID NO: 32695 - RNA, 22 nt, synthetic construct
  source 1..22: mol_type = other RNA
ggagacccctgttccagcctca

SEQ ID NO: 32696 - RNA, 22 nt, synthetic construct
  source 1..22: mol_type = other RNA
ggagaggtggtcggggagccag

SEQ ID NO: 32697 - RNA, 22 nt, synthetic construct
  source 1..22: mol_type = other RNA
ggagatggtggggacaaactgg

SEQ ID NO: 32698 - RNA, 22 nt, synthetic construct
  source 1..22: mol_type = other RNA
ggagattcaggcagctcaacga

SEQ ID NO: 32699 - RNA, 22 nt, synthetic construct
  source 1..22: mol_type = other RNA
ggagccaggccccgcactcacc

SEQ ID NO: 32700 - RNA, 22 nt, synthetic construct
  source 1..22: mol_type = other RNA
ggagggagaggtggtcggggag

SEQ ID NO: 32701 - RNA, 22 nt, synthetic construct
  source 1..22: mol_type = other RNA
ggatgggtccctcagggagatt

SEQ ID NO: 32702 - RNA, 22 nt, synthetic construct
  source 1..22: mol_type = other RNA
ggcaaatctctgaggctggaac

SEQ ID NO: 32703 - RNA, 22 nt, synthetic construct
  source 1..22: mol_type = other RNA
ggcactgcaagagacaaaggca

SEQ ID NO: 32704 - RNA, 22 nt, synthetic construct
  source 1..22: mol_type = other RNA
ggcagagtggagatggtgggga

SEQ ID NO: 32705 - RNA, 22 nt, synthetic construct
  source 1..22: mol_type = other RNA
ggcagctcaacgaggaactgga

SEQ ID NO: 32706 - RNA, 22 nt, synthetic construct
  source 1..22: mol_type = other RNA
ggcagtgaggtgggatcttgca

SEQ ID NO: 32707 - RNA, 22 nt, synthetic construct
  source 1..22: mol_type = other RNA
ggccccgcactcaccatggtag

SEQ ID NO: 32708 - RNA, 22 nt, synthetic construct
  source 1..22: mol_type = other RNA
ggcctggctccccgaccacctc

SEQ ID NO: 32709 - RNA, 22 nt, synthetic construct
  source 1..22: mol_type = other RNA
ggctccccgaccacctctccct

SEQ ID NO: 32710 - RNA, 22 nt, synthetic construct
  source 1..22: mol_type = other RNA
ggctctggcaaatctctgaggc

SEQ ID NO: 32711 - RNA, 22 nt, synthetic construct
  source 1..22: mol_type = other RNA
ggctggaacaggggtctccagt

SEQ ID NO: 32712 - RNA, 22 nt, synthetic construct
  source 1..22: mol_type = other RNA
gggacaaactggatgggtccct

SEQ ID NO: 32713 - RNA, 22 nt, synthetic construct
  source 1..22: mol_type = other RNA
gggacccatccagtttgtcccc

SEQ ID NO: 32714 - RNA, 22 nt, synthetic construct
  source 1..22: mol_type = other RNA
gggagaggtggtcggggagcca

SEQ ID NO: 32715 - RNA, 22 nt, synthetic construct
  source 1..22: mol_type = other RNA
gggagattcaggcagctcaacg

SEQ ID NO: 32716 - RNA, 22 nt, synthetic construct
  source 1..22: mol_type = other RNA
gggagccaggccccgcactcac

SEQ ID NO: 32717 - RNA, 22 nt, synthetic construct
  source 1..22: mol_type = other RNA
gggcagagtggagatggtgggg

SEQ ID NO: 32718 - RNA, 22 nt, synthetic construct
  source 1..22: mol_type = other RNA
gggcctggctccccgaccacct

SEQ ID NO: 32719 - RNA, 22 nt, synthetic construct
  source 1..22: mol_type = other RNA
gggctctggcaaatctctgagg

SEQ ID NO: 32720 - RNA, 22 nt, synthetic construct
  source 1..22: mol_type = other RNA
ggggacaaactggatgggtccc

SEQ ID NO: 32721 - RNA, 22 nt, synthetic construct
  source 1..22: mol_type = other RNA
ggggagccaggccccgcactca

SEQ ID NO: 32722 - RNA, 22 nt, synthetic construct
  source 1..22: mol_type = other RNA
ggggcagagtggagatggtggg

SEQ ID NO: 32723 - RNA, 22 nt, synthetic construct
  source 1..22: mol_type = other RNA
ggggtctccagtatattcatct

SEQ ID NO: 32724 - RNA, 22 nt, synthetic construct
  source 1..22: mol_type = other RNA
gggtccctcagggagattcagg

SEQ ID NO: 32725 - RNA, 22 nt, synthetic construct
  source 1..22: mol_type = other RNA
gggtctccagtatattcatcta

SEQ ID NO: 32726 - RNA, 22 nt, synthetic construct
  source 1..22: mol_type = other RNA
ggtagatgaatatactggagac

SEQ ID NO: 32727 - RNA, 22 nt, synthetic construct
  source 1..22: mol_type = other RNA
ggtaggagggagaggtggtcgg

SEQ ID NO: 32728 - RNA, 22 nt, synthetic construct
  source 1..22: mol_type = other RNA
ggtccctcagggagattcaggc

SEQ ID NO: 32729 - RNA, 22 nt, synthetic construct
  source 1..22: mol_type = other RNA
ggtctccagtatattcatctac

SEQ ID NO: 32730 - RNA, 22 nt, synthetic construct
  source 1..22: mol_type = other RNA
ggtgagtgcggggcctggctcc

SEQ ID NO: 32731 - RNA, 22 nt, synthetic construct
  source 1..22: mol_type = other RNA
ggtgctatgcaagatcccacct

SEQ ID NO: 32732 - RNA, 22 nt, synthetic construct
  source 1..22: mol_type = other RNA
ggtggggacaaactggatgggt

SEQ ID NO: 32733 - RNA, 22 nt, synthetic construct
  source 1..22: mol_type = other RNA
gtagatgaatatactggagacc

SEQ ID NO: 32734 - RNA, 22 nt, synthetic construct
  source 1..22: mol_type = other RNA
gtaggagggagaggtggtcggg

SEQ ID NO: 32735 - RNA, 22 nt, synthetic construct
  source 1..22: mol_type = other RNA
gtatattcatctaccatggtga

SEQ ID NO: 32736 - RNA, 22 nt, synthetic construct
  source 1..22: mol_type = other RNA
gtccccaccatctccactctgc

SEQ ID NO: 32737 - RNA, 22 nt, synthetic construct
  source 1..22: mol_type = other RNA
gtccctcagggagattcaggca

SEQ ID NO: 32738 - RNA, 22 nt, synthetic construct
  source 1..22: mol_type = other RNA
gtctccagtatattcatctacc

SEQ ID NO: 32739 - RNA, 22 nt, synthetic construct
  source 1..22: mol_type = other RNA
gtctcttgcagtgcctttctcc

SEQ ID NO: 32740 - RNA, 22 nt, synthetic construct
  source 1..22: mol_type = other RNA
gtgagtgcggggcctggctccc

SEQ ID NO: 32741 - RNA, 22 nt, synthetic construct
  source 1..22: mol_type = other RNA
gtgcctttctccagttcctcgt

SEQ ID NO: 32742 - RNA, 22 nt, synthetic construct
  source 1..22: mol_type = other RNA
gtgctatgcaagatcccacctc

SEQ ID NO: 32743 - RNA, 22 nt, synthetic construct
  source 1..22: mol_type = other RNA
gtggagatggtggggacaaact

SEQ ID NO: 32744 - RNA, 22 nt, synthetic construct
  source 1..22: mol_type = other RNA
gtggggacaaactggatgggtc

SEQ ID NO: 32745 - RNA, 22 nt, synthetic construct
  source 1..22: mol_type = other RNA
gttccagcctcagagatttgcc

SEQ ID NO: 32746 - RNA, 22 nt, synthetic construct
  source 1..22: mol_type = other RNA
gttcctcgttgagctgcctgaa

SEQ ID NO: 32747 - RNA, 22 nt, synthetic construct
  source 1..22: mol_type = other RNA
gttgagctgcctgaatctccct

SEQ ID NO: 32748 - RNA, 22 nt, synthetic construct
  source 1..22: mol_type = other RNA
gtttgtccccaccatctccact

SEQ ID NO: 32749 - RNA, 22 nt, synthetic construct
  source 1..22: mol_type = other RNA
taccatggtgagtgcggggcct

SEQ ID NO: 32750 - RNA, 22 nt, synthetic construct
  source 1..22: mol_type = other RNA
tactggagacccctgttccagc

SEQ ID NO: 32751 - RNA, 22 nt, synthetic construct
  source 1..22: mol_type = other RNA
tagatgaatatactggagaccc

SEQ ID NO: 32752 - RNA, 22 nt, synthetic construct
  source 1..22: mol_type = other RNA
taggagggagaggtggtcgggg

SEQ ID NO: 32753 - RNA, 22 nt, synthetic construct
  source 1..22: mol_type = other RNA
tatactggagacccctgttcca

SEQ ID NO: 32754 - RNA, 22 nt, synthetic construct
  source 1..22: mol_type = other RNA
tatattcatctaccatggtgag

SEQ ID NO: 32755 - RNA, 22 nt, synthetic construct
  source 1..22: mol_type = other RNA
tatgcaagatcccacctcactg

SEQ ID NO: 32756 - RNA, 22 nt, synthetic construct
  source 1..22: mol_type = other RNA
tattcatctaccatggtgagtg

SEQ ID NO: 32757 - RNA, 22 nt, synthetic construct
  source 1..22: mol_type = other RNA
tcaacgaggaactggagaaagg

SEQ ID NO: 32758 - RNA, 22 nt, synthetic construct
  source 1..22: mol_type = other RNA
tcaccatggtagatgaatatac

SEQ ID NO: 32759 - RNA, 22 nt, synthetic construct
  source 1..22: mol_type = other RNA
tcactgcctttgtctcttgcag

SEQ ID NO: 32760 - RNA, 22 nt, synthetic construct
  source 1..22: mol_type = other RNA
tcagagatttgccagagcccat

SEQ ID NO: 32761 - RNA, 22 nt, synthetic construct
  source 1..22: mol_type = other RNA
tcaggcagctcaacgaggaact

SEQ ID NO: 32762 - RNA, 22 nt, synthetic construct
  source 1..22: mol_type = other RNA
tcagggagattcaggcagctca

SEQ ID NO: 32763 - RNA, 22 nt, synthetic construct
  source 1..22: mol_type = other RNA
tcatctaccatggtgagtgcgg

SEQ ID NO: 32764 - RNA, 22 nt, synthetic construct
  source 1..22: mol_type = other RNA
tccactctgccccatgggctct

SEQ ID NO: 32765 - RNA, 22 nt, synthetic construct
  source 1..22: mol_type = other RNA
tccagcctcagagatttgccag

SEQ ID NO: 32766 - RNA, 22 nt, synthetic construct
  source 1..22: mol_type = other RNA
tccagtatattcatctaccatg

SEQ ID NO: 32767 - RNA, 22 nt, synthetic construct
  source 1..22: mol_type = other RNA
tccagttcctcgttgagctgcc

SEQ ID NO: 32768 - RNA, 22 nt, synthetic construct
  source 1..22: mol_type = other RNA
tccagtttgtccccaccatctc

SEQ ID NO: 32769 - RNA, 22 nt, synthetic construct
  source 1..22: mol_type = other RNA
tcccacctcactgcctttgtct

SEQ ID NO: 32770 - RNA, 22 nt, synthetic construct
  source 1..22: mol_type = other RNA
tccccaccatctccactctgcc

SEQ ID NO: 32771 - RNA, 22 nt, synthetic construct
  source 1..22: mol_type = other RNA
tccctcagggagattcaggcag

SEQ ID NO: 32772 - RNA, 22 nt, synthetic construct
  source 1..22: mol_type = other RNA
tccctgagggacccatccagtt

SEQ ID NO: 32773 - RNA, 22 nt, synthetic construct
  source 1..22: mol_type = other RNA
tcctcgttgagctgcctgaatc

SEQ ID NO: 32774 - RNA, 22 nt, synthetic construct
  source 1..22: mol_type = other RNA
tcggggagccaggccccgcact

SEQ ID NO: 32775 - RNA, 22 nt, synthetic construct
  source 1..22: mol_type = other RNA
tcgttgagctgcctgaatctcc

SEQ ID NO: 32776 - RNA, 22 nt, synthetic construct
  source 1..22: mol_type = other RNA
tctaccatggtgagtgcggggc

SEQ ID NO: 32777 - RNA, 22 nt, synthetic construct
  source 1..22: mol_type = other RNA
tctccactctgccccatgggct

SEQ ID NO: 32778 - RNA, 22 nt, synthetic construct
  source 1..22: mol_type = other RNA
tctccagtatattcatctacca

SEQ ID NO: 32779 - RNA, 22 nt, synthetic construct
  source 1..22: mol_type = other RNA
tctccagttcctcgttgagctg

SEQ ID NO: 32780 - RNA, 22 nt, synthetic construct
  source 1..22: mol_type = other RNA
tctccctgagggacccatccag

SEQ ID NO: 32781 - RNA, 22 nt, synthetic construct
  source 1..22: mol_type = other RNA
tctctgaggctggaacaggggt

SEQ ID NO: 32782 - RNA, 22 nt, synthetic construct
  source 1..22: mol_type = other RNA
tctcttgcagtgcctttctcca

SEQ ID NO: 32783 - RNA, 22 nt, synthetic construct
  source 1..22: mol_type = other RNA
tctgaggctggaacaggggtct

SEQ ID NO: 32784 - RNA, 22 nt, synthetic construct
  source 1..22: mol_type = other RNA
tctgccccatgggctctggcaa

SEQ ID NO: 32785 - RNA, 22 nt, synthetic construct
  source 1..22: mol_type = other RNA
tctggcaaatctctgaggctgg

SEQ ID NO: 32786 - RNA, 22 nt, synthetic construct
  source 1..22: mol_type = other RNA
tcttgcagtgcctttctccagt

SEQ ID NO: 32787 - RNA, 22 nt, synthetic construct
  source 1..22: mol_type = other RNA
tgaatatactggagacccctgt

SEQ ID NO: 32788 - RNA, 22 nt, synthetic construct
  source 1..22: mol_type = other RNA
tgaatctccctgagggacccat

SEQ ID NO: 32789 - RNA, 22 nt, synthetic construct
  source 1..22: mol_type = other RNA
tgagctgcctgaatctccctga

SEQ ID NO: 32790 - RNA, 22 nt, synthetic construct
  source 1..22: mol_type = other RNA
tgaggctggaacaggggtctcc

SEQ ID NO: 32791 - RNA, 22 nt, synthetic construct
  source 1..22: mol_type = other RNA
tgagggacccatccagtttgtc

SEQ ID NO: 32792 - RNA, 22 nt, synthetic construct
  source 1..22: mol_type = other RNA
tgagtgcggggcctggctcccc

SEQ ID NO: 32793 - RNA, 22 nt, synthetic construct
  source 1..22: mol_type = other RNA
tgcaagagacaaaggcagtgag

SEQ ID NO: 32794 - RNA, 22 nt, synthetic construct
  source 1..22: mol_type = other RNA
tgcaagatcccacctcactgcc

SEQ ID NO: 32795 - RNA, 22 nt, synthetic construct
  source 1..22: mol_type = other RNA
tgcagtgcctttctccagttcc

SEQ ID NO: 32796 - RNA, 22 nt, synthetic construct
  source 1..22: mol_type = other RNA
tgccagagcccatggggcagag

SEQ ID NO: 32797 - RNA, 22 nt, synthetic construct
  source 1..22: mol_type = other RNA
tgccccatgggctctggcaaat

SEQ ID NO: 32798 - RNA, 22 nt, synthetic construct
  source 1..22: mol_type = other RNA
tgcctgaatctccctgagggac

SEQ ID NO: 32799 - RNA, 22 nt, synthetic construct
  source 1..22: mol_type = other RNA
tgcctttctccagttcctcgtt

SEQ ID NO: 32800 - RNA, 22 nt, synthetic construct
  source 1..22: mol_type = other RNA
tgcctttgtctcttgcagtgcc

SEQ ID NO: 32801 - RNA, 22 nt, synthetic construct
  source 1..22: mol_type = other RNA
tgctatgcaagatcccacctca

SEQ ID NO: 32802 - RNA, 22 nt, synthetic construct
  source 1..22: mol_type = other RNA
tggaacaggggtctccagtata

SEQ ID NO: 32803 - RNA, 22 nt, synthetic construct
  source 1..22: mol_type = other RNA
tggagaaaggcactgcaagaga

SEQ ID NO: 32804 - RNA, 22 nt, synthetic construct
  source 1..22: mol_type = other RNA
tggagacccctgttccagcctc

SEQ ID NO: 32805 - RNA, 22 nt, synthetic construct
  source 1..22: mol_type = other RNA
tggagatggtggggacaaactg

SEQ ID NO: 32806 - RNA, 22 nt, synthetic construct
  source 1..22: mol_type = other RNA
tggatgggtccctcagggagat

SEQ ID NO: 32807 - RNA, 22 nt, synthetic construct
  source 1..22: mol_type = other RNA
tggcaaatctctgaggctggaa

SEQ ID NO: 32808 - RNA, 22 nt, synthetic construct
  source 1..22: mol_type = other RNA
tggctccccgaccacctctccc

SEQ ID NO: 32809 - RNA, 22 nt, synthetic construct
  source 1..22: mol_type = other RNA
tgggctctggcaaatctctgag

SEQ ID NO: 32810 - RNA, 22 nt, synthetic construct
  source 1..22: mol_type = other RNA
tggggacaaactggatgggtcc

SEQ ID NO: 32811 - RNA, 22 nt, synthetic construct
  source 1..22: mol_type = other RNA
tggggcagagtggagatggtgg

SEQ ID NO: 32812 - RNA, 22 nt, synthetic construct
  source 1..22: mol_type = other RNA
tgggtccctcagggagattcag

SEQ ID NO: 32813 - RNA, 22 nt, synthetic construct
  source 1..22: mol_type = other RNA
tggtagatgaatatactggaga

SEQ ID NO: 32814 - RNA, 22 nt, synthetic construct
  source 1..22: mol_type = other RNA
tggtgagtgcggggcctggctc

SEQ ID NO: 32815 - RNA, 22 nt, synthetic construct
  source 1..22: mol_type = other RNA
tggtggggacaaactggatggg

SEQ ID NO: 32816 - RNA, 22 nt, synthetic construct
  source 1..22: mol_type = other RNA
tgtccccaccatctccactctg

SEQ ID NO: 32817 - RNA, 22 nt, synthetic construct
  source 1..22: mol_type = other RNA
tgtctcttgcagtgcctttctc

SEQ ID NO: 32818 - RNA, 22 nt, synthetic construct
  source 1..22: mol_type = other RNA
tgttccagcctcagagatttgc

SEQ ID NO: 32819 - RNA, 22 nt, synthetic construct
  source 1..22: mol_type = other RNA
ttcaggcagctcaacgaggaac

SEQ ID NO: 32820 - RNA, 22 nt, synthetic construct
  source 1..22: mol_type = other RNA
ttcatctaccatggtgagtgcg

SEQ ID NO: 32821 - RNA, 22 nt, synthetic construct
  source 1..22: mol_type = other RNA
ttccagcctcagagatttgcca

SEQ ID NO: 32822 - RNA, 22 nt, synthetic construct
  source 1..22: mol_type = other RNA
ttcctcgttgagctgcctgaat

SEQ ID NO: 32823 - RNA, 22 nt, synthetic construct
  source 1..22: mol_type = other RNA
ttctccagttcctcgttgagct

SEQ ID NO: 32824 - RNA, 22 nt, synthetic construct
  source 1..22: mol_type = other RNA
ttgagctgcctgaatctccctg

SEQ ID NO: 32825 - RNA, 22 nt, synthetic construct
  source 1..22: mol_type = other RNA
ttgcagtgcctttctccagttc

SEQ ID NO: 32826 - RNA, 22 nt, synthetic construct
  source 1..22: mol_type = other RNA
ttgccagagcccatggggcaga

SEQ ID NO: 32827 - RNA, 22 nt, synthetic construct
  source 1..22: mol_type = other RNA
ttgtccccaccatctccactct

SEQ ID NO: 32828 - RNA, 22 nt, synthetic construct
  source 1..22: mol_type = other RNA
ttgtctcttgcagtgcctttct

SEQ ID NO: 32829 - RNA, 22 nt, synthetic construct
  source 1..22: mol_type = other RNA
tttctccagttcctcgttgagc

SEQ ID NO: 32830 - RNA, 22 nt, synthetic construct
  source 1..22: mol_type = other RNA
tttgccagagcccatggggcag

SEQ ID NO: 32831 - RNA, 22 nt, synthetic construct
  source 1..22: mol_type = other RNA
tttgtccccaccatctccactc

SEQ ID NO: 32832 - RNA, 22 nt, synthetic construct
  source 1..22: mol_type = other RNA
tttgtctcttgcagtgcctttc

SEQ ID NO: 32833 - RNA, 20 nt, synthetic construct
  source 1..20: mol_type = other RNA
aaacatgacaggtaaggacc

SEQ ID NO: 32834 - RNA, 20 nt, synthetic construct
  source 1..20: mol_type = other RNA
aacatctccagaccggccag

SEQ ID NO: 32835 - RNA, 20 nt, synthetic construct
  source 1..20: mol_type = other RNA
aacatgacaggtaaggaccc

SEQ ID NO: 32836 - RNA, 20 nt, synthetic construct
  source 1..20: mol_type = other RNA
aacctgccctgacctcccga

SEQ ID NO: 32837 - RNA, 20 nt, synthetic construct
  source 1..20: mol_type = other RNA
aaggacccttagggcctgtg

SEQ ID NO: 32838 - RNA, 20 nt, synthetic construct
  source 1..20: mol_type = other RNA
aaggggctggtggagcctgg

SEQ ID NO: 32839 - RNA, 20 nt, synthetic construct
  source 1..20: mol_type = other RNA
aagggtccttacctgtcatg

SEQ ID NO: 32840 - RNA, 20 nt, synthetic construct
  source 1..20: mol_type = other RNA
aagtaccccctcccagtgga

SEQ ID NO: 32841 - RNA, 20 nt, synthetic construct
  source 1..20: mol_type = other RNA
aatacctggttattctcaca

SEQ ID NO: 32842 - RNA, 20 nt, synthetic construct
  source 1..20: mol_type = other RNA
aatcaatacctggttattct

SEQ ID NO: 32843 - RNA, 20 nt, synthetic construct
  source 1..20: mol_type = other RNA
aatccactgggagggggtac

SEQ ID NO: 32844 - RNA, 20 nt, synthetic construct
  source 1..20: mol_type = other RNA
aatgtaggtgaggtgcccca

SEQ ID NO: 32845 - RNA, 20 nt, synthetic construct
  source 1..20: mol_type = other RNA
acaccactctccacccccaa

SEQ ID NO: 32846 - RNA, 20 nt, synthetic construct
  source 1..20: mol_type = other RNA
acaggccctaagggtcctta

SEQ ID NO: 32847 - RNA, 20 nt, synthetic construct
  source 1..20: mol_type = other RNA
acaggtaaggacccttaggg

SEQ ID NO: 32848 - RNA, 20 nt, synthetic construct
  source 1..20: mol_type = other RNA
acagtgaatccactgggagg

SEQ ID NO: 32849 - RNA, 20 nt, synthetic construct
  source 1..20: mol_type = other RNA
acatctccagaccggccagg

SEQ ID NO: 32850 - RNA, 20 nt, synthetic construct
  source 1..20: mol_type = other RNA
acatgacaggtaaggaccct

SEQ ID NO: 32851 - RNA, 20 nt, synthetic construct
  source 1..20: mol_type = other RNA
acattgggggtggagagtgg

SEQ ID NO: 32852 - RNA, 20 nt, synthetic construct
  source 1..20: mol_type = other RNA
accactctccacccccaatg

SEQ ID NO: 32853 - RNA, 20 nt, synthetic construct
  source 1..20: mol_type = other RNA
accagccccttcgctccatc

SEQ ID NO: 32854 - RNA, 20 nt, synthetic construct
  source 1..20: mol_type = other RNA
acccccaatgtaggtgaggt

SEQ ID NO: 32855 - RNA, 20 nt, synthetic construct
  source 1..20: mol_type = other RNA
accccctcccagtggattca

SEQ ID NO: 32856 - RNA, 20 nt, synthetic construct
  source 1..20: mol_type = other RNA
acccttagggcctgtgagag

SEQ ID NO: 32857 - RNA, 20 nt, synthetic construct
  source 1..20: mol_type = other RNA
accggccaggctccaccagc

SEQ ID NO: 32858 - RNA, 20 nt, synthetic construct
  source 1..20: mol_type = other RNA
acctacattgggggtggaga

SEQ ID NO: 32859 - RNA, 20 nt, synthetic construct
  source 1..20: mol_type = other RNA
acctcacctacattgggggt

SEQ ID NO: 32860 - RNA, 20 nt, synthetic construct
  source 1..20: mol_type = other RNA
acctcccgagcaaacatgac

SEQ ID NO: 32861 - RNA, 20 nt, synthetic construct
  source 1..20: mol_type = other RNA
acctctcacaggccctaagg

SEQ ID NO: 32862 - RNA, 20 nt, synthetic construct
  source 1..20: mol_type = other RNA
acctgcccagcatgcctgaa

SEQ ID NO: 32863 - RNA, 20 nt, synthetic construct
  source 1..20: mol_type = other RNA
acctgccctgacctcccgag

SEQ ID NO: 32864 - RNA, 20 nt, synthetic construct
  source 1..20: mol_type = other RNA
acctggttattctcacacca

SEQ ID NO: 32865 - RNA, 20 nt, synthetic construct
  source 1..20: mol_type = other RNA
acctgtcatgtttgctcggg

SEQ ID NO: 32866 - RNA, 20 nt, synthetic construct
  source 1..20: mol_type = other RNA
acggcctcccaacatctcca

SEQ ID NO: 32867 - RNA, 20 nt, synthetic construct
  source 1..20: mol_type = other RNA
actctccacccccaatgtag

SEQ ID NO: 32868 - RNA, 20 nt, synthetic construct
  source 1..20: mol_type = other RNA
actgacctgcccagcatgcc

SEQ ID NO: 32869 - RNA, 20 nt, synthetic construct
  source 1..20: mol_type = other RNA
actgggagggggtacttggc

SEQ ID NO: 32870 - RNA, 20 nt, synthetic construct
  source 1..20: mol_type = other RNA
actgtccacggcctcccaac

SEQ ID NO: 32871 - RNA, 20 nt, synthetic construct
  source 1..20: mol_type = other RNA
acttggctggcctggggcac

SEQ ID NO: 32872 - RNA, 20 nt, synthetic construct
  source 1..20: mol_type = other RNA
agaccggccaggctccacca

SEQ ID NO: 32873 - RNA, 20 nt, synthetic construct
  source 1..20: mol_type = other RNA
agagtggtgtgagaataacc

SEQ ID NO: 32874 - RNA, 20 nt, synthetic construct
  source 1..20: mol_type = other RNA
agatgttgggaggccgtgga

SEQ ID NO: 32875 - RNA, 20 nt, synthetic construct
  source 1..20: mol_type = other RNA
agcaaacatgacaggtaagg

SEQ ID NO: 32876 - RNA, 20 nt, synthetic construct
  source 1..20: mol_type = other RNA
agcatgcctgaacctgccct

SEQ ID NO: 32877 - RNA, 20 nt, synthetic construct
  source 1..20: mol_type = other RNA
agccaagtaccccctcccag

SEQ ID NO: 32878 - RNA, 20 nt, synthetic construct
  source 1..20: mol_type = other RNA
agccactgacctgcccagca

SEQ ID NO: 32879 - RNA, 20 nt, synthetic construct
  source 1..20: mol_type = other RNA
agccccttcgctccatcagc

SEQ ID NO: 32880 - RNA, 20 nt, synthetic construct
  source 1..20: mol_type = other RNA
agcctggccggtctggagat

SEQ ID NO: 32881 - RNA, 20 nt, synthetic construct
  source 1..20: mol_type = other RNA
agcgaaggggctggtggagc

SEQ ID NO: 32882 - RNA, 20 nt, synthetic construct
  source 1..20: mol_type = other RNA
aggacccttagggcctgtga

SEQ ID NO: 32883 - RNA, 20 nt, synthetic construct
  source 1..20: mol_type = other RNA
aggcatgctgggcaggtcag

SEQ ID NO: 32884 - RNA, 20 nt, synthetic construct
  source 1..20: mol_type = other RNA
aggccagccaagtaccccct

SEQ ID NO: 32885 - RNA, 20 nt, synthetic construct
  source 1..20: mol_type = other RNA
aggccctaagggtccttacc

SEQ ID NO: 32886 - RNA, 20 nt, synthetic construct
  source 1..20: mol_type = other RNA
aggccgtggacagtgaatcc

SEQ ID NO: 32887 - RNA, 20 nt, synthetic construct
  source 1..20: mol_type = other RNA
aggctccaccagccccttcg

SEQ ID NO: 32888 - RNA, 20 nt, synthetic construct
  source 1..20: mol_type = other RNA
agggcaggttcaggcatgct

SEQ ID NO: 32889 - RNA, 20 nt, synthetic construct
  source 1..20: mol_type = other RNA
agggcctgtgagaggtacta

SEQ ID NO: 32890 - RNA, 20 nt, synthetic construct
  source 1..20: mol_type = other RNA
aggggctggtggagcctggc

SEQ ID NO: 32891 - RNA, 20 nt, synthetic construct
  source 1..20: mol_type = other RNA
agggggtacttggctggcct

SEQ ID NO: 32892 - RNA, 20 nt, synthetic construct
  source 1..20: mol_type = other RNA
agggtccttacctgtcatgt

SEQ ID NO: 32893 - RNA, 20 nt, synthetic construct
  source 1..20: mol_type = other RNA
aggtaaggacccttagggcc

SEQ ID NO: 32894 - RNA, 20 nt, synthetic construct
  source 1..20: mol_type = other RNA
aggtcagggcaggttcaggc

SEQ ID NO: 32895 - RNA, 20 nt, synthetic construct
  source 1..20: mol_type = other RNA
aggtcagtggctgatggagc

SEQ ID NO: 32896 - RNA, 20 nt, synthetic construct
  source 1..20: mol_type = other RNA
aggtgaggtgccccaggcca

SEQ ID NO: 32897 - RNA, 20 nt, synthetic construct
  source 1..20: mol_type = other RNA
aggtgccccaggccagccaa

SEQ ID NO: 32898 - RNA, 20 nt, synthetic construct
  source 1..20: mol_type = other RNA
aggttcaggcatgctgggca

SEQ ID NO: 32899 - RNA, 20 nt, synthetic construct
  source 1..20: mol_type = other RNA
agtaccccctcccagtggat

SEQ ID NO: 32900 - RNA, 20 nt, synthetic construct
  source 1..20: mol_type = other RNA
agtacctctcacaggcccta

SEQ ID NO: 32901 - RNA, 20 nt, synthetic construct
  source 1..20: mol_type = other RNA
agtgaatccactgggagggg

SEQ ID NO: 32902 - RNA, 20 nt, synthetic construct
  source 1..20: mol_type = other RNA
agtggattcactgtccacgg

SEQ ID NO: 32903 - RNA, 20 nt, synthetic construct
  source 1..20: mol_type = other RNA
agtggctgatggagcgaagg

SEQ ID NO: 32904 - RNA, 20 nt, synthetic construct
  source 1..20: mol_type = other RNA
agtggtgtgagaataaccag

SEQ ID NO: 32905 - RNA, 20 nt, synthetic construct
  source 1..20: mol_type = other RNA
atacctggttattctcacac

SEQ ID NO: 32906 - RNA, 20 nt, synthetic construct
  source 1..20: mol_type = other RNA
atcaatacctggttattctc

SEQ ID NO: 32907 - RNA, 20 nt, synthetic construct
  source 1..20: mol_type = other RNA
atcagccactgacctgccca

SEQ ID NO: 32908 - RNA, 20 nt, synthetic construct
  source 1..20: mol_type = other RNA
atccactgggagggggtact

SEQ ID NO: 32909 - RNA, 20 nt, synthetic construct
  source 1..20: mol_type = other RNA
atcctgcttctagtacctct

SEQ ID NO: 32910 - RNA, 20 nt, synthetic construct
  source 1..20: mol_type = other RNA
atctccagaccggccaggct

SEQ ID NO: 32911 - RNA, 20 nt, synthetic construct
  source 1..20: mol_type = other RNA
atgacaggtaaggaccctta

SEQ ID NO: 32912 - RNA, 20 nt, synthetic construct
  source 1..20: mol_type = other RNA
atgcctgaacctgccctgac

SEQ ID NO: 32913 - RNA, 20 nt, synthetic construct
  source 1..20: mol_type = other RNA
atgctgggcaggtcagtggc

SEQ ID NO: 32914 - RNA, 20 nt, synthetic construct
  source 1..20: mol_type = other RNA
atggagcgaaggggctggtg

SEQ ID NO: 32915 - RNA, 20 nt, synthetic construct
  source 1..20: mol_type = other RNA
atgtaggtgaggtgccccag

SEQ ID NO: 32916 - RNA, 20 nt, synthetic construct
  source 1..20: mol_type = other RNA
atgttgggaggccgtggaca

SEQ ID NO: 32917 - RNA, 20 nt, synthetic construct
  source 1..20: mol_type = other RNA
atgtttgctcgggaggtcag

SEQ ID NO: 32918 - RNA, 20 nt, synthetic construct
  source 1..20: mol_type = other RNA
attcactgtccacggcctcc

SEQ ID NO: 32919 - RNA, 20 nt, synthetic construct
  source 1..20: mol_type = other RNA
attctcacaccactctccac

SEQ ID NO: 32920 - RNA, 20 nt, synthetic construct
  source 1..20: mol_type = other RNA
attgggggtggagagtggtg

SEQ ID NO: 32921 - RNA, 20 nt, synthetic construct
  source 1..20: mol_type = other RNA
caaacatgacaggtaaggac

SEQ ID NO: 32922 - RNA, 20 nt, synthetic construct
  source 1..20: mol_type = other RNA
caacatctccagaccggcca

SEQ ID NO: 32923 - RNA, 20 nt, synthetic construct
  source 1..20: mol_type = other RNA
caagtaccccctcccagtgg

SEQ ID NO: 32924 - RNA, 20 nt, synthetic construct
  source 1..20: mol_type = other RNA
caatacctggttattctcac

SEQ ID NO: 32925 - RNA, 20 nt, synthetic construct
  source 1..20: mol_type = other RNA
caatgtaggtgaggtgcccc

SEQ ID NO: 32926 - RNA, 20 nt, synthetic construct
  source 1..20: mol_type = other RNA
cacaccactctccaccccca

SEQ ID NO: 32927 - RNA, 20 nt, synthetic construct
  source 1..20: mol_type = other RNA
cacaggccctaagggtcctt

SEQ ID NO: 32928 - RNA, 20 nt, synthetic construct
  source 1..20: mol_type = other RNA
caccactctccacccccaat

SEQ ID NO: 32929 - RNA, 20 nt, synthetic construct
  source 1..20: mol_type = other RNA
caccagccccttcgctccat

SEQ ID NO: 32930 - RNA, 20 nt, synthetic construct
  source 1..20: mol_type = other RNA
cacccccaatgtaggtgagg

SEQ ID NO: 32931 - RNA, 20 nt, synthetic construct
  source 1..20: mol_type = other RNA
cacctacattgggggtggag

SEQ ID NO: 32932 - RNA, 20 nt, synthetic construct
  source 1..20: mol_type = other RNA
cacctcacctacattggggg

SEQ ID NO: 32933 - RNA, 20 nt, synthetic construct
  source 1..20: mol_type = other RNA
cacggcctcccaacatctcc

SEQ ID NO: 32934 - RNA, 20 nt, synthetic construct
  source 1..20: mol_type = other RNA
cactctccacccccaatgta

SEQ ID NO: 32935 - RNA, 20 nt, synthetic construct
  source 1..20: mol_type = other RNA
cactgacctgcccagcatgc

SEQ ID NO: 32936 - RNA, 20 nt, synthetic construct
  source 1..20: mol_type = other RNA
cactgggagggggtacttgg

SEQ ID NO: 32937 - RNA, 20 nt, synthetic construct
  source 1..20: mol_type = other RNA
cactgtccacggcctcccaa

SEQ ID NO: 32938 - RNA, 20 nt, synthetic construct
  source 1..20: mol_type = other RNA
cagaccggccaggctccacc

SEQ ID NO: 32939 - RNA, 20 nt, synthetic construct
  source 1..20: mol_type = other RNA
cagcatgcctgaacctgccc

SEQ ID NO: 32940 - RNA, 20 nt, synthetic construct
  source 1..20: mol_type = other RNA
cagccaagtaccccctccca

SEQ ID NO: 32941 - RNA, 20 nt, synthetic construct
  source 1..20: mol_type = other RNA
cagccactgacctgcccagc

SEQ ID NO: 32942 - RNA, 20 nt, synthetic construct
  source 1..20: mol_type = other RNA
cagccccttcgctccatcag

SEQ ID NO: 32943 - RNA, 20 nt, synthetic construct
  source 1..20: mol_type = other RNA
caggcatgctgggcaggtca

SEQ ID NO: 32944 - RNA, 20 nt, synthetic construct
  source 1..20: mol_type = other RNA
caggccagccaagtaccccc

SEQ ID NO: 32945 - RNA, 20 nt, synthetic construct
  source 1..20: mol_type = other RNA
caggccctaagggtccttac

SEQ ID NO: 32946 - RNA, 20 nt, synthetic construct
  source 1..20: mol_type = other RNA
caggctccaccagccccttc

SEQ ID NO: 32947 - RNA, 20 nt, synthetic construct
  source 1..20: mol_type = other RNA
cagggcaggttcaggcatgc

SEQ ID NO: 32948 - RNA, 20 nt, synthetic construct
  source 1..20: mol_type = other RNA
caggtaaggacccttagggc

SEQ ID NO: 32949 - RNA, 20 nt, synthetic construct
  source 1..20: mol_type = other RNA
caggtcagtggctgatggag

SEQ ID NO: 32950 - RNA, 20 nt, synthetic construct
  source 1..20: mol_type = other RNA
caggttcaggcatgctgggc

SEQ ID NO: 32951 - RNA, 20 nt, synthetic construct
  source 1..20: mol_type = other RNA
cagtgaatccactgggaggg

SEQ ID NO: 32952 - RNA, 20 nt, synthetic construct
  source 1..20: mol_type = other RNA
cagtggattcactgtccacg

SEQ ID NO: 32953 - RNA, 20 nt, synthetic construct
  source 1..20: mol_type = other RNA
cagtggctgatggagcgaag

SEQ ID NO: 32954 - RNA, 20 nt, synthetic construct
  source 1..20: mol_type = other RNA
catcagccactgacctgccc

SEQ ID NO: 32955 - RNA, 20 nt, synthetic construct
  source 1..20: mol_type = other RNA
catctccagaccggccaggc

SEQ ID NO: 32956 - RNA, 20 nt, synthetic construct
  source 1..20: mol_type = other RNA
catgacaggtaaggaccctt

SEQ ID NO: 32957 - RNA, 20 nt, synthetic construct
  source 1..20: mol_type = other RNA
catgcctgaacctgccctga

SEQ ID NO: 32958 - RNA, 20 nt, synthetic construct
  source 1..20: mol_type = other RNA
catgctgggcaggtcagtgg

SEQ ID NO: 32959 - RNA, 20 nt, synthetic construct
  source 1..20: mol_type = other RNA
catgtttgctcgggaggtca

SEQ ID NO: 32960 - RNA, 20 nt, synthetic construct
  source 1..20: mol_type = other RNA
cattgggggtggagagtggt

SEQ ID NO: 32961 - RNA, 20 nt, synthetic construct
  source 1..20: mol_type = other RNA
ccaacatctccagaccggcc

SEQ ID NO: 32962 - RNA, 20 nt, synthetic construct
  source 1..20: mol_type = other RNA
ccaagtaccccctcccagtg

SEQ ID NO: 32963 - RNA, 20 nt, synthetic construct
  source 1..20: mol_type = other RNA
ccaatgtaggtgaggtgccc

SEQ ID NO: 32964 - RNA, 20 nt, synthetic construct
  source 1..20: mol_type = other RNA
ccaccagccccttcgctcca

SEQ ID NO: 32965 - RNA, 20 nt, synthetic construct
  source 1..20: mol_type = other RNA
ccacccccaatgtaggtgag

SEQ ID NO: 32966 - RNA, 20 nt, synthetic construct
  source 1..20: mol_type = other RNA
ccacggcctcccaacatctc

SEQ ID NO: 32967 - RNA, 20 nt, synthetic construct
  source 1..20: mol_type = other RNA
ccactctccacccccaatgt

SEQ ID NO: 32968 - RNA, 20 nt, synthetic construct
  source 1..20: mol_type = other RNA
ccactgacctgcccagcatg

SEQ ID NO: 32969 - RNA, 20 nt, synthetic construct
  source 1..20: mol_type = other RNA
ccactgggagggggtacttg

SEQ ID NO: 32970 - RNA, 20 nt, synthetic construct
  source 1..20: mol_type = other RNA
ccagaccggccaggctccac

SEQ ID NO: 32971 - RNA, 20 nt, synthetic construct
  source 1..20: mol_type = other RNA
ccagcatgcctgaacctgcc

SEQ ID NO: 32972 - RNA, 20 nt, synthetic construct
  source 1..20: mol_type = other RNA
ccagccaagtaccccctccc

SEQ ID NO: 32973 - RNA, 20 nt, synthetic construct
  source 1..20: mol_type = other RNA
ccagccccttcgctccatca

SEQ ID NO: 32974 - RNA, 20 nt, synthetic construct
  source 1..20: mol_type = other RNA
ccaggccagccaagtacccc

SEQ ID NO: 32975 - RNA, 20 nt, synthetic construct
  source 1..20: mol_type = other RNA
ccaggctccaccagcccctt

SEQ ID NO: 32976 - RNA, 20 nt, synthetic construct
  source 1..20: mol_type = other RNA
ccagtggattcactgtccac

SEQ ID NO: 32977 - RNA, 20 nt, synthetic construct
  source 1..20: mol_type = other RNA
ccatcagccactgacctgcc

SEQ ID NO: 32978 - RNA, 20 nt, synthetic construct
  source 1..20: mol_type = other RNA
cccaacatctccagaccggc

SEQ ID NO: 32979 - RNA, 20 nt, synthetic construct
  source 1..20: mol_type = other RNA
cccaatgtaggtgaggtgcc

SEQ ID NO: 32980 - RNA, 20 nt, synthetic construct
  source 1..20: mol_type = other RNA
cccagcatgcctgaacctgc

SEQ ID NO: 32981 - RNA, 20 nt, synthetic construct
  source 1..20: mol_type = other RNA
cccaggccagccaagtaccc

SEQ ID NO: 32982 - RNA, 20 nt, synthetic construct
  source 1..20: mol_type = other RNA
cccagtggattcactgtcca

SEQ ID NO: 32983 - RNA, 20 nt, synthetic construct
  source 1..20: mol_type = other RNA
ccccaatgtaggtgaggtgc

SEQ ID NO: 32984 - RNA, 20 nt, synthetic construct
  source 1..20: mol_type = other RNA
ccccaggccagccaagtacc

SEQ ID NO: 32985 - RNA, 20 nt, synthetic construct
  source 1..20: mol_type = other RNA
cccccaatgtaggtgaggtg

SEQ ID NO: 32986 - RNA, 20 nt, synthetic construct
  source 1..20: mol_type = other RNA
ccccctcccagtggattcac

SEQ ID NO: 32987 - RNA, 20 nt, synthetic construct
  source 1..20: mol_type = other RNA
cccctcccagtggattcact

SEQ ID NO: 32988 - RNA, 20 nt, synthetic construct
  source 1..20: mol_type = other RNA
ccccttcgctccatcagcca

SEQ ID NO: 32989 - RNA, 20 nt, synthetic construct
  source 1..20: mol_type = other RNA
cccgagcaaacatgacaggt

SEQ ID NO: 32990 - RNA, 20 nt, synthetic construct
  source 1..20: mol_type = other RNA
ccctaagggtccttacctgt

SEQ ID NO: 32991 - RNA, 20 nt, synthetic construct
  source 1..20: mol_type = other RNA
ccctcccagtggattcactg

SEQ ID NO: 32992 - RNA, 20 nt, synthetic construct
  source 1..20: mol_type = other RNA
ccctgacctcccgagcaaac

SEQ ID NO: 32993 - RNA, 20 nt, synthetic construct
  source 1..20: mol_type = other RNA
cccttagggcctgtgagagg

SEQ ID NO: 32994 - RNA, 20 nt, synthetic construct
  source 1..20: mol_type = other RNA
cccttcgctccatcagccac

SEQ ID NO: 32995 - RNA, 20 nt, synthetic construct
  source 1..20: mol_type = other RNA
ccgagcaaacatgacaggta

SEQ ID NO: 32996 - RNA, 20 nt, synthetic construct
  source 1..20: mol_type = other RNA
ccggccaggctccaccagcc

SEQ ID NO: 32997 - RNA, 20 nt, synthetic construct
  source 1..20: mol_type = other RNA
ccggtctggagatgttggga

SEQ ID NO: 32998 - RNA, 20 nt, synthetic construct
  source 1..20: mol_type = other RNA
ccgtggacagtgaatccact

SEQ ID NO: 32999 - RNA, 20 nt, synthetic construct
  source 1..20: mol_type = other RNA
cctaagggtccttacctgtc

SEQ ID NO: 33000 - RNA, 20 nt, synthetic construct
  source 1..20: mol_type = other RNA
cctacattgggggtggagag

SEQ ID NO: 33001 - RNA, 20 nt, synthetic construct
  source 1..20: mol_type = other RNA
cctcacctacattgggggtg

SEQ ID NO: 33002 - RNA, 20 nt, synthetic construct
  source 1..20: mol_type = other RNA
cctcccaacatctccagacc

SEQ ID NO: 33003 - RNA, 20 nt, synthetic construct
  source 1..20: mol_type = other RNA
cctcccagtggattcactgt

SEQ ID NO: 33004 - RNA, 20 nt, synthetic construct
  source 1..20: mol_type = other RNA
cctcccgagcaaacatgaca

SEQ ID NO: 33005 - RNA, 20 nt, synthetic construct
  source 1..20: mol_type = other RNA
cctctcacaggccctaaggg

SEQ ID NO: 33006 - RNA, 20 nt, synthetic construct
  source 1..20: mol_type = other RNA
cctgaacctgccctgacctc

SEQ ID NO: 33007 - RNA, 20 nt, synthetic construct
  source 1..20: mol_type = other RNA
cctgacctcccgagcaaaca

SEQ ID NO: 33008 - RNA, 20 nt, synthetic construct
  source 1..20: mol_type = other RNA
cctgcccagcatgcctgaac

SEQ ID NO: 33009 - RNA, 20 nt, synthetic construct
  source 1..20: mol_type = other RNA
cctgccctgacctcccgagc

SEQ ID NO: 33010 - RNA, 20 nt, synthetic construct
  source 1..20: mol_type = other RNA
cctgcttctagtacctctca

SEQ ID NO: 33011 - RNA, 20 nt, synthetic construct
  source 1..20: mol_type = other RNA
cctggccggtctggagatgt

SEQ ID NO: 33012 - RNA, 20 nt, synthetic construct
  source 1..20: mol_type = other RNA
cctggggcacctcacctaca

SEQ ID NO: 33013 - RNA, 20 nt, synthetic construct
  source 1..20: mol_type = other RNA
cctggttattctcacaccac

SEQ ID NO: 33014 - RNA, 20 nt, synthetic construct
  source 1..20: mol_type = other RNA
cctgtcatgtttgctcggga

SEQ ID NO: 33015 - RNA, 20 nt, synthetic construct
  source 1..20: mol_type = other RNA
cctgtgagaggtactagaag

SEQ ID NO: 33016 - RNA, 20 nt, synthetic construct
  source 1..20: mol_type = other RNA
ccttacctgtcatgtttgct

SEQ ID NO: 33017 - RNA, 20 nt, synthetic construct
  source 1..20: mol_type = other RNA
ccttagggcctgtgagaggt

SEQ ID NO: 33018 - RNA, 20 nt, synthetic construct
  source 1..20: mol_type = other RNA
ccttcgctccatcagccact

SEQ ID NO: 33019 - RNA, 20 nt, synthetic construct
  source 1..20: mol_type = other RNA
cgaaggggctggtggagcct

SEQ ID NO: 33020 - RNA, 20 nt, synthetic construct
  source 1..20: mol_type = other RNA
cgagcaaacatgacaggtaa

SEQ ID NO: 33021 - RNA, 20 nt, synthetic construct
  source 1..20: mol_type = other RNA
cgatcctgcttctagtacct

SEQ ID NO: 33022 - RNA, 20 nt, synthetic construct
  source 1..20: mol_type = other RNA
cgctccatcagccactgacc

SEQ ID NO: 33023 - RNA, 20 nt, synthetic construct
  source 1..20: mol_type = other RNA
cggccaggctccaccagccc

SEQ ID NO: 33024 - RNA, 20 nt, synthetic construct
  source 1..20: mol_type = other RNA
cggcctcccaacatctccag

SEQ ID NO: 33025 - RNA, 20 nt, synthetic construct
  source 1..20: mol_type = other RNA
cgggaggtcagggcaggttc

SEQ ID NO: 33026 - RNA, 20 nt, synthetic construct
  source 1..20: mol_type = other RNA
cggtctggagatgttgggag

SEQ ID NO: 33027 - RNA, 20 nt, synthetic construct
  source 1..20: mol_type = other RNA
cgtggacagtgaatccactg

SEQ ID NO: 33028 - RNA, 20 nt, synthetic construct
  source 1..20: mol_type = other RNA
ctaagggtccttacctgtca

SEQ ID NO: 33029 - RNA, 20 nt, synthetic construct
  source 1..20: mol_type = other RNA
ctacattgggggtggagagt

SEQ ID NO: 33030 - RNA, 20 nt, synthetic construct
  source 1..20: mol_type = other RNA
ctagtacctctcacaggccc

SEQ ID NO: 33031 - RNA, 20 nt, synthetic construct
  source 1..20: mol_type = other RNA
ctcacaccactctccacccc

SEQ ID NO: 33032 - RNA, 20 nt, synthetic construct
  source 1..20: mol_type = other RNA
ctcacaggccctaagggtcc

SEQ ID NO: 33033 - RNA, 20 nt, synthetic construct
  source 1..20: mol_type = other RNA
ctcacctacattgggggtgg

SEQ ID NO: 33034 - RNA, 20 nt, synthetic construct
  source 1..20: mol_type = other RNA
ctccaccagccccttcgctc

SEQ ID NO: 33035 - RNA, 20 nt, synthetic construct
  source 1..20: mol_type = other RNA
ctccacccccaatgtaggtg

SEQ ID NO: 33036 - RNA, 20 nt, synthetic construct
  source 1..20: mol_type = other RNA
ctccagaccggccaggctcc

SEQ ID NO: 33037 - RNA, 20 nt, synthetic construct
  source 1..20: mol_type = other RNA
ctccatcagccactgacctg

SEQ ID NO: 33038 - RNA, 20 nt, synthetic construct
  source 1..20: mol_type = other RNA
ctcccaacatctccagaccg

SEQ ID NO: 33039 - RNA, 20 nt, synthetic construct
  source 1..20: mol_type = other RNA
ctcccagtggattcactgtc

SEQ ID NO: 33040 - RNA, 20 nt, synthetic construct
  source 1..20: mol_type = other RNA
ctcccgagcaaacatgacag

SEQ ID NO: 33041 - RNA, 20 nt, synthetic construct
  source 1..20: mol_type = other RNA
ctcgggaggtcagggcaggt

SEQ ID NO: 33042 - RNA, 20 nt, synthetic construct
  source 1..20: mol_type = other RNA
ctctcacaggccctaagggt

SEQ ID NO: 33043 - RNA, 20 nt, synthetic construct
  source 1..20: mol_type = other RNA
ctctccacccccaatgtagg

SEQ ID NO: 33044 - RNA, 20 nt, synthetic construct
  source 1..20: mol_type = other RNA
ctgaacctgccctgacctcc

SEQ ID NO: 33045 - RNA, 20 nt, synthetic construct
  source 1..20: mol_type = other RNA
ctgacctcccgagcaaacat

SEQ ID NO: 33046 - RNA, 20 nt, synthetic construct
  source 1..20: mol_type = other RNA
ctgacctgcccagcatgcct

SEQ ID NO: 33047 - RNA, 20 nt, synthetic construct
  source 1..20: mol_type = other RNA
ctgatggagcgaaggggctg

SEQ ID NO: 33048 - RNA, 20 nt, synthetic construct
  source 1..20: mol_type = other RNA
ctgcccagcatgcctgaacc

SEQ ID NO: 33049 - RNA, 20 nt, synthetic construct
  source 1..20: mol_type = other RNA
ctgccctgacctcccgagca

SEQ ID NO: 33050 - RNA, 20 nt, synthetic construct
  source 1..20: mol_type = other RNA
ctgcttctagtacctctcac

SEQ ID NO: 33051 - RNA, 20 nt, synthetic construct
  source 1..20: mol_type = other RNA
ctggagatgttgggaggccg

SEQ ID NO: 33052 - RNA, 20 nt, synthetic construct
  source 1..20: mol_type = other RNA
ctggccggtctggagatgtt

SEQ ID NO: 33053 - RNA, 20 nt, synthetic construct
  source 1..20: mol_type = other RNA
ctggcctggggcacctcacc

SEQ ID NO: 33054 - RNA, 20 nt, synthetic construct
  source 1..20: mol_type = other RNA
ctgggagggggtacttggct

SEQ ID NO: 33055 - RNA, 20 nt, synthetic construct
  source 1..20: mol_type = other RNA
ctgggcaggtcagtggctga

SEQ ID NO: 33056 - RNA, 20 nt, synthetic construct
  source 1..20: mol_type = other RNA
ctggggcacctcacctacat

SEQ ID NO: 33057 - RNA, 20 nt, synthetic construct
  source 1..20: mol_type = other RNA
ctggtggagcctggccggtc

SEQ ID NO: 33058 - RNA, 20 nt, synthetic construct
  source 1..20: mol_type = other RNA
ctggttattctcacaccact

SEQ ID NO: 33059 - RNA, 20 nt, synthetic construct
  source 1..20: mol_type = other RNA
ctgtcatgtttgctcgggag

SEQ ID NO: 33060 - RNA, 20 nt, synthetic construct
  source 1..20: mol_type = other RNA
ctgtccacggcctcccaaca

SEQ ID NO: 33061 - RNA, 20 nt, synthetic construct
  source 1..20: mol_type = other RNA
ctgtgagaggtactagaagc

SEQ ID NO: 33062 - RNA, 20 nt, synthetic construct
  source 1..20: mol_type = other RNA
cttacctgtcatgtttgctc

SEQ ID NO: 33063 - RNA, 20 nt, synthetic construct
  source 1..20: mol_type = other RNA
cttagggcctgtgagaggta

SEQ ID NO: 33064 - RNA, 20 nt, synthetic construct
  source 1..20: mol_type = other RNA
cttcgctccatcagccactg

SEQ ID NO: 33065 - RNA, 20 nt, synthetic construct
  source 1..20: mol_type = other RNA
cttctagtacctctcacagg

SEQ ID NO: 33066 - RNA, 20 nt, synthetic construct
  source 1..20: mol_type = other RNA
cttggctggcctggggcacc

SEQ ID NO: 33067 - RNA, 20 nt, synthetic construct
  source 1..20: mol_type = other RNA
gaacctgccctgacctcccg

SEQ ID NO: 33068 - RNA, 20 nt, synthetic construct
  source 1..20: mol_type = other RNA
gaaggggctggtggagcctg

SEQ ID NO: 33069 - RNA, 20 nt, synthetic construct
  source 1..20: mol_type = other RNA
gaatccactgggagggggta

SEQ ID NO: 33070 - RNA, 20 nt, synthetic construct
  source 1..20: mol_type = other RNA
gacaggtaaggacccttagg

SEQ ID NO: 33071 - RNA, 20 nt, synthetic construct
  source 1..20: mol_type = other RNA
gacagtgaatccactgggag

SEQ ID NO: 33072 - RNA, 20 nt, synthetic construct
  source 1..20: mol_type = other RNA
gacccttagggcctgtgaga

SEQ ID NO: 33073 - RNA, 20 nt, synthetic construct
  source 1..20: mol_type = other RNA
gaccggccaggctccaccag

SEQ ID NO: 33074 - RNA, 20 nt, synthetic construct
  source 1..20: mol_type = other RNA
gacctcccgagcaaacatga

SEQ ID NO: 33075 - RNA, 20 nt, synthetic construct
  source 1..20: mol_type = other RNA
gacctgcccagcatgcctga

SEQ ID NO: 33076 - RNA, 20 nt, synthetic construct
  source 1..20: mol_type = other RNA
gagagtggtgtgagaataac

SEQ ID NO: 33077 - RNA, 20 nt, synthetic construct
  source 1..20: mol_type = other RNA
gagatgttgggaggccgtgg

SEQ ID NO: 33078 - RNA, 20 nt, synthetic construct
  source 1..20: mol_type = other RNA
gagcaaacatgacaggtaag

SEQ ID NO: 33079 - RNA, 20 nt, synthetic construct
  source 1..20: mol_type = other RNA
gagcctggccggtctggaga

SEQ ID NO: 33080 - RNA, 20 nt, synthetic construct
  source 1..20: mol_type = other RNA
gagcgaaggggctggtggag

SEQ ID NO: 33081 - RNA, 20 nt, synthetic construct
  source 1..20: mol_type = other RNA
gaggccgtggacagtgaatc

SEQ ID NO: 33082 - RNA, 20 nt, synthetic construct
  source 1..20: mol_type = other RNA
gagggggtacttggctggcc

SEQ ID NO: 33083 - RNA, 20 nt, synthetic construct
  source 1..20: mol_type = other RNA
gaggtcagggcaggttcagg

SEQ ID NO: 33084 - RNA, 20 nt, synthetic construct
  source 1..20: mol_type = other RNA
gaggtgccccaggccagcca

SEQ ID NO: 33085 - RNA, 20 nt, synthetic construct
  source 1..20: mol_type = other RNA
gagtggtgtgagaataacca

SEQ ID NO: 33086 - RNA, 20 nt, synthetic construct
  source 1..20: mol_type = other RNA
gatcctgcttctagtacctc

SEQ ID NO: 33087 - RNA, 20 nt, synthetic construct
  source 1..20: mol_type = other RNA
gatggagcgaaggggctggt

SEQ ID NO: 33088 - RNA, 20 nt, synthetic construct
  source 1..20: mol_type = other RNA
gatgttgggaggccgtggac

SEQ ID NO: 33089 - RNA, 20 nt, synthetic construct
  source 1..20: mol_type = other RNA
gattcactgtccacggcctc

SEQ ID NO: 33090 - RNA, 20 nt, synthetic construct
  source 1..20: mol_type = other RNA
gcaaacatgacaggtaagga

SEQ ID NO: 33091 - RNA, 20 nt, synthetic construct
  source 1..20: mol_type = other RNA
gcacctcacctacattgggg

SEQ ID NO: 33092 - RNA, 20 nt, synthetic construct
  source 1..20: mol_type = other RNA
gcaggtcagtggctgatgga

SEQ ID NO: 33093 - RNA, 20 nt, synthetic construct
  source 1..20: mol_type = other RNA
gcaggttcaggcatgctggg

SEQ ID NO: 33094 - RNA, 20 nt, synthetic construct
  source 1..20: mol_type = other RNA
gcatgcctgaacctgccctg

SEQ ID NO: 33095 - RNA, 20 nt, synthetic construct
  source 1..20: mol_type = other RNA
gcatgctgggcaggtcagtg

SEQ ID NO: 33096 - RNA, 20 nt, synthetic construct
  source 1..20: mol_type = other RNA
gccaagtaccccctcccagt

SEQ ID NO: 33097 - RNA, 20 nt, synthetic construct
  source 1..20: mol_type = other RNA
gccactgacctgcccagcat

SEQ ID NO: 33098 - RNA, 20 nt, synthetic construct
  source 1..20: mol_type = other RNA
gccagccaagtaccccctcc

SEQ ID NO: 33099 - RNA, 20 nt, synthetic construct
  source 1..20: mol_type = other RNA
gccaggctccaccagcccct

SEQ ID NO: 33100 - RNA, 20 nt, synthetic construct
  source 1..20: mol_type = other RNA
gcccagcatgcctgaacctg

SEQ ID NO: 33101 - RNA, 20 nt, synthetic construct
  source 1..20: mol_type = other RNA
gccccaggccagccaagtac

SEQ ID NO: 33102 - RNA, 20 nt, synthetic construct
  source 1..20: mol_type = other RNA
gccccttcgctccatcagcc

SEQ ID NO: 33103 - RNA, 20 nt, synthetic construct
  source 1..20: mol_type = other RNA
gccctaagggtccttacctg

SEQ ID NO: 33104 - RNA, 20 nt, synthetic construct
  source 1..20: mol_type = other RNA
gccctgacctcccgagcaaa

SEQ ID NO: 33105 - RNA, 20 nt, synthetic construct
  source 1..20: mol_type = other RNA
gccggtctggagatgttggg

SEQ ID NO: 33106 - RNA, 20 nt, synthetic construct
  source 1..20: mol_type = other RNA
gccgtggacagtgaatccac

SEQ ID NO: 33107 - RNA, 20 nt, synthetic construct
  source 1..20: mol_type = other RNA
gcctcccaacatctccagac

SEQ ID NO: 33108 - RNA, 20 nt, synthetic construct
  source 1..20: mol_type = other RNA
gcctgaacctgccctgacct

SEQ ID NO: 33109 - RNA, 20 nt, synthetic construct
  source 1..20: mol_type = other RNA
gcctggccggtctggagatg

SEQ ID NO: 33110 - RNA, 20 nt, synthetic construct
  source 1..20: mol_type = other RNA
gcctggggcacctcacctac

SEQ ID NO: 33111 - RNA, 20 nt, synthetic construct
  source 1..20: mol_type = other RNA
gcctgtgagaggtactagaa

SEQ ID NO: 33112 - RNA, 20 nt, synthetic construct
  source 1..20: mol_type = other RNA
gcgaaggggctggtggagcc

SEQ ID NO: 33113 - RNA, 20 nt, synthetic construct
  source 1..20: mol_type = other RNA
gctccaccagccccttcgct

SEQ ID NO: 33114 - RNA, 20 nt, synthetic construct
  source 1..20: mol_type = other RNA
gctccatcagccactgacct

SEQ ID NO: 33115 - RNA, 20 nt, synthetic construct
  source 1..20: mol_type = other RNA
gctcgggaggtcagggcagg

SEQ ID NO: 33116 - RNA, 20 nt, synthetic construct
  source 1..20: mol_type = other RNA
gctgatggagcgaaggggct

SEQ ID NO: 33117 - RNA, 20 nt, synthetic construct
  source 1..20: mol_type = other RNA
gctggcctggggcacctcac

SEQ ID NO: 33118 - RNA, 20 nt, synthetic construct
  source 1..20: mol_type = other RNA
gctgggcaggtcagtggctg

SEQ ID NO: 33119 - RNA, 20 nt, synthetic construct
  source 1..20: mol_type = other RNA
gctggtggagcctggccggt

SEQ ID NO: 33120 - RNA, 20 nt, synthetic construct
  source 1..20: mol_type = other RNA
gcttctagtacctctcacag

SEQ ID NO: 33121 - RNA, 20 nt, synthetic construct
  source 1..20: mol_type = other RNA
ggacagtgaatccactggga

SEQ ID NO: 33122 - RNA, 20 nt, synthetic construct
  source 1..20: mol_type = other RNA
ggacccttagggcctgtgag

SEQ ID NO: 33123 - RNA, 20 nt, synthetic construct
  source 1..20: mol_type = other RNA
ggagagtggtgtgagaataa

SEQ ID NO: 33124 - RNA, 20 nt, synthetic construct
  source 1..20: mol_type = other RNA
ggagatgttgggaggccgtg

SEQ ID NO: 33125 - RNA, 20 nt, synthetic construct
  source 1..20: mol_type = other RNA
ggagcctggccggtctggag

SEQ ID NO: 33126 - RNA, 20 nt, synthetic construct
  source 1..20: mol_type = other RNA
ggagcgaaggggctggtgga

SEQ ID NO: 33127 - RNA, 20 nt, synthetic construct
  source 1..20: mol_type = other RNA
ggaggccgtggacagtgaat

SEQ ID NO: 33128 - RNA, 20 nt, synthetic construct
  source 1..20: mol_type = other RNA
ggagggggtacttggctggc

SEQ ID NO: 33129 - RNA, 20 nt, synthetic construct
  source 1..20: mol_type = other RNA
ggaggtcagggcaggttcag

SEQ ID NO: 33130 - RNA, 20 nt, synthetic construct
  source 1..20: mol_type = other RNA
ggattcactgtccacggcct

SEQ ID NO: 33131 - RNA, 20 nt, synthetic construct
  source 1..20: mol_type = other RNA
ggcacctcacctacattggg

SEQ ID NO: 33132 - RNA, 20 nt, synthetic construct
  source 1..20: mol_type = other RNA
ggcaggtcagtggctgatgg

SEQ ID NO: 33133 - RNA, 20 nt, synthetic construct
  source 1..20: mol_type = other RNA
ggcaggttcaggcatgctgg

SEQ ID NO: 33134 - RNA, 20 nt, synthetic construct
  source 1..20: mol_type = other RNA
ggcatgctgggcaggtcagt

SEQ ID NO: 33135 - RNA, 20 nt, synthetic construct
  source 1..20: mol_type = other RNA
ggccagccaagtaccccctc

SEQ ID NO: 33136 - RNA, 20 nt, synthetic construct
  source 1..20: mol_type = other RNA
ggccaggctccaccagcccc

SEQ ID NO: 33137 - RNA, 20 nt, synthetic construct
  source 1..20: mol_type = other RNA
ggccctaagggtccttacct

SEQ ID NO: 33138 - RNA, 20 nt, synthetic construct
  source 1..20: mol_type = other RNA
ggccggtctggagatgttgg

SEQ ID NO: 33139 - RNA, 20 nt, synthetic construct
  source 1..20: mol_type = other RNA
ggccgtggacagtgaatcca

SEQ ID NO: 33140 - RNA, 20 nt, synthetic construct
  source 1..20: mol_type = other RNA
ggcctcccaacatctccaga

SEQ ID NO: 33141 - RNA, 20 nt, synthetic construct
  source 1..20: mol_type = other RNA
ggcctggggcacctcaccta

SEQ ID NO: 33142 - RNA, 20 nt, synthetic construct
  source 1..20: mol_type = other RNA
ggcctgtgagaggtactaga

SEQ ID NO: 33143 - RNA, 20 nt, synthetic construct
  source 1..20: mol_type = other RNA
ggctccaccagccccttcgc

SEQ ID NO: 33144 - RNA, 20 nt, synthetic construct
  source 1..20: mol_type = other RNA
ggctgatggagcgaaggggc

SEQ ID NO: 33145 - RNA, 20 nt, synthetic construct
  source 1..20: mol_type = other RNA
ggctggcctggggcacctca

SEQ ID NO: 33146 - RNA, 20 nt, synthetic construct
  source 1..20: mol_type = other RNA
ggctggtggagcctggccgg

SEQ ID NO: 33147 - RNA, 20 nt, synthetic construct
  source 1..20: mol_type = other RNA
gggaggccgtggacagtgaa

SEQ ID NO: 33148 - RNA, 20 nt, synthetic construct
  source 1..20: mol_type = other RNA
gggagggggtacttggctgg

SEQ ID NO: 33149 - RNA, 20 nt, synthetic construct
  source 1..20: mol_type = other RNA
gggaggtcagggcaggttca

SEQ ID NO: 33150 - RNA, 20 nt, synthetic construct
  source 1..20: mol_type = other RNA
gggcacctcacctacattgg

SEQ ID NO: 33151 - RNA, 20 nt, synthetic construct
  source 1..20: mol_type = other RNA
gggcaggtcagtggctgatg

SEQ ID NO: 33152 - RNA, 20 nt, synthetic construct
  source 1..20: mol_type = other RNA
gggcaggttcaggcatgctg

SEQ ID NO: 33153 - RNA, 20 nt, synthetic construct
  source 1..20: mol_type = other RNA
gggcctgtgagaggtactag

SEQ ID NO: 33154 - RNA, 20 nt, synthetic construct
  source 1..20: mol_type = other RNA
gggctggtggagcctggccg

SEQ ID NO: 33155 - RNA, 20 nt, synthetic construct
  source 1..20: mol_type = other RNA
ggggcacctcacctacattg

SEQ ID NO: 33156 - RNA, 20 nt, synthetic construct
  source 1..20: mol_type = other RNA
ggggctggtggagcctggcc

SEQ ID NO: 33157 - RNA, 20 nt, synthetic construct
  source 1..20: mol_type = other RNA
gggggtacttggctggcctg

SEQ ID NO: 33158 - RNA, 20 nt, synthetic construct
  source 1..20: mol_type = other RNA
gggggtggagagtggtgtga

SEQ ID NO: 33159 - RNA, 20 nt, synthetic construct
  source 1..20: mol_type = other RNA
ggggtacttggctggcctgg

SEQ ID NO: 33160 - RNA, 20 nt, synthetic construct
  source 1..20: mol_type = other RNA
ggggtggagagtggtgtgag

SEQ ID NO: 33161 - RNA, 20 nt, synthetic construct
  source 1..20: mol_type = other RNA
gggtacttggctggcctggg

SEQ ID NO: 33162 - RNA, 20 nt, synthetic construct
  source 1..20: mol_type = other RNA
gggtccttacctgtcatgtt

SEQ ID NO: 33163 - RNA, 20 nt, synthetic construct
  source 1..20: mol_type = other RNA
gggtggagagtggtgtgaga

SEQ ID NO: 33164 - RNA, 20 nt, synthetic construct
  source 1..20: mol_type = other RNA
ggtaaggacccttagggcct

SEQ ID NO: 33165 - RNA, 20 nt, synthetic construct
  source 1..20: mol_type = other RNA
ggtacttggctggcctgggg

SEQ ID NO: 33166 - RNA, 20 nt, synthetic construct
  source 1..20: mol_type = other RNA
ggtcagggcaggttcaggca

SEQ ID NO: 33167 - RNA, 20 nt, synthetic construct
  source 1..20: mol_type = other RNA
ggtcagtggctgatggagcg

SEQ ID NO: 33168 - RNA, 20 nt, synthetic construct
  source 1..20: mol_type = other RNA
ggtccttacctgtcatgttt

SEQ ID NO: 33169 - RNA, 20 nt, synthetic construct
  source 1..20: mol_type = other RNA
ggtctggagatgttgggagg

SEQ ID NO: 33170 - RNA, 20 nt, synthetic construct
  source 1..20: mol_type = other RNA
ggtgaggtgccccaggccag

SEQ ID NO: 33171 - RNA, 20 nt, synthetic construct
  source 1..20: mol_type = other RNA
ggtgccccaggccagccaag

SEQ ID NO: 33172 - RNA, 20 nt, synthetic construct
  source 1..20: mol_type = other RNA
ggtggagagtggtgtgagaa

SEQ ID NO: 33173 - RNA, 20 nt, synthetic construct
  source 1..20: mol_type = other RNA
ggtggagcctggccggtctg

SEQ ID NO: 33174 - RNA, 20 nt, synthetic construct
  source 1..20: mol_type = other RNA
ggttattctcacaccactct

SEQ ID NO: 33175 - RNA, 20 nt, synthetic construct
  source 1..20: mol_type = other RNA
ggttcaggcatgctgggcag

SEQ ID NO: 33176 - RNA, 20 nt, synthetic construct
  source 1..20: mol_type = other RNA
gtaaggacccttagggcctg

SEQ ID NO: 33177 - RNA, 20 nt, synthetic construct
  source 1..20: mol_type = other RNA
gtaccccctcccagtggatt

SEQ ID NO: 33178 - RNA, 20 nt, synthetic construct
  source 1..20: mol_type = other RNA
gtacctctcacaggccctaa

SEQ ID NO: 33179 - RNA, 20 nt, synthetic construct
  source 1..20: mol_type = other RNA
gtacttggctggcctggggc

SEQ ID NO: 33180 - RNA, 20 nt, synthetic construct
  source 1..20: mol_type = other RNA
gtaggtgaggtgccccaggc

SEQ ID NO: 33181 - RNA, 20 nt, synthetic construct
  source 1..20: mol_type = other RNA
gtcagggcaggttcaggcat

SEQ ID NO: 33182 - RNA, 20 nt, synthetic construct
  source 1..20: mol_type = other RNA
gtcagtggctgatggagcga

SEQ ID NO: 33183 - RNA, 20 nt, synthetic construct
  source 1..20: mol_type = other RNA
gtcatgtttgctcgggaggt

SEQ ID NO: 33184 - RNA, 20 nt, synthetic construct
  source 1..20: mol_type = other RNA
gtccacggcctcccaacatc

SEQ ID NO: 33185 - RNA, 20 nt, synthetic construct
  source 1..20: mol_type = other RNA
gtccttacctgtcatgtttg

SEQ ID NO: 33186 - RNA, 20 nt, synthetic construct
  source 1..20: mol_type = other RNA
gtctggagatgttgggaggc

SEQ ID NO: 33187 - RNA, 20 nt, synthetic construct
  source 1..20: mol_type = other RNA
gtgaatccactgggaggggg

SEQ ID NO: 33188 - RNA, 20 nt, synthetic construct
  source 1..20: mol_type = other RNA
gtgaggtgccccaggccagc

SEQ ID NO: 33189 - RNA, 20 nt, synthetic construct
  source 1..20: mol_type = other RNA
gtgccccaggccagccaagt

SEQ ID NO: 33190 - RNA, 20 nt, synthetic construct
  source 1..20: mol_type = other RNA
gtggacagtgaatccactgg

SEQ ID NO: 33191 - RNA, 20 nt, synthetic construct
  source 1..20: mol_type = other RNA
gtggagagtggtgtgagaat

SEQ ID NO: 33192 - RNA, 20 nt, synthetic construct
  source 1..20: mol_type = other RNA
gtggagcctggccggtctgg

SEQ ID NO: 33193 - RNA, 20 nt, synthetic construct
  source 1..20: mol_type = other RNA
gtggattcactgtccacggc

SEQ ID NO: 33194 - RNA, 20 nt, synthetic construct
  source 1..20: mol_type = other RNA
gtggctgatggagcgaaggg

SEQ ID NO: 33195 - RNA, 20 nt, synthetic construct
  source 1..20: mol_type = other RNA
gtggtgtgagaataaccagg

SEQ ID NO: 33196 - RNA, 20 nt, synthetic construct
  source 1..20: mol_type = other RNA
gttattctcacaccactctc

SEQ ID NO: 33197 - RNA, 20 nt, synthetic construct
  source 1..20: mol_type = other RNA
gttcaggcatgctgggcagg

SEQ ID NO: 33198 - RNA, 20 nt, synthetic construct
  source 1..20: mol_type = other RNA
gttgggaggccgtggacagt

SEQ ID NO: 33199 - RNA, 20 nt, synthetic construct
  source 1..20: mol_type = other RNA
gtttgctcgggaggtcaggg

SEQ ID NO: 33200 - RNA, 20 nt, synthetic construct
  source 1..20: mol_type = other RNA
taaggacccttagggcctgt

SEQ ID NO: 33201 - RNA, 20 nt, synthetic construct
  source 1..20: mol_type = other RNA
taagggtccttacctgtcat

SEQ ID NO: 33202 - RNA, 20 nt, synthetic construct
  source 1..20: mol_type = other RNA
tacattgggggtggagagtg

SEQ ID NO: 33203 - RNA, 20 nt, synthetic construct
  source 1..20: mol_type = other RNA
taccccctcccagtggattc

SEQ ID NO: 33204 - RNA, 20 nt, synthetic construct
  source 1..20: mol_type = other RNA
tacctctcacaggccctaag

SEQ ID NO: 33205 - RNA, 20 nt, synthetic construct
  source 1..20: mol_type = other RNA
tacctggttattctcacacc

SEQ ID NO: 33206 - RNA, 20 nt, synthetic construct
  source 1..20: mol_type = other RNA
tacctgtcatgtttgctcgg

SEQ ID NO: 33207 - RNA, 20 nt, synthetic construct
  source 1..20: mol_type = other RNA
tacttggctggcctggggca

SEQ ID NO: 33208 - RNA, 20 nt, synthetic construct
  source 1..20: mol_type = other RNA
tagggcctgtgagaggtact

SEQ ID NO: 33209 - RNA, 20 nt, synthetic construct
  source 1..20: mol_type = other RNA
taggtgaggtgccccaggcc

SEQ ID NO: 33210 - RNA, 20 nt, synthetic construct
  source 1..20: mol_type = other RNA
tagtacctctcacaggccct

SEQ ID NO: 33211 - RNA, 20 nt, synthetic construct
  source 1..20: mol_type = other RNA
tattctcacaccactctcca

SEQ ID NO: 33212 - RNA, 20 nt, synthetic construct
  source 1..20: mol_type = other RNA
tcaatacctggttattctca

SEQ ID NO: 33213 - RNA, 20 nt, synthetic construct
  source 1..20: mol_type = other RNA
tcacaccactctccaccccc

SEQ ID NO: 33214 - RNA, 20 nt, synthetic construct
  source 1..20: mol_type = other RNA
tcacaggccctaagggtcct

SEQ ID NO: 33215 - RNA, 20 nt, synthetic construct
  source 1..20: mol_type = other RNA
tcacctacattgggggtgga

SEQ ID NO: 33216 - RNA, 20 nt, synthetic construct
  source 1..20: mol_type = other RNA
tcactgtccacggcctccca

SEQ ID NO: 33217 - RNA, 20 nt, synthetic construct
  source 1..20: mol_type = other RNA
tcagccactgacctgcccag

SEQ ID NO: 33218 - RNA, 20 nt, synthetic construct
  source 1..20: mol_type = other RNA
tcaggcatgctgggcaggtc

SEQ ID NO: 33219 - RNA, 20 nt, synthetic construct
  source 1..20: mol_type = other RNA
tcagggcaggttcaggcatg

SEQ ID NO: 33220 - RNA, 20 nt, synthetic construct
  source 1..20: mol_type = other RNA
tcagtggctgatggagcgaa

SEQ ID NO: 33221 - RNA, 20 nt, synthetic construct
  source 1..20: mol_type = other RNA
tcatgtttgctcgggaggtc

SEQ ID NO: 33222 - RNA, 20 nt, synthetic construct
  source 1..20: mol_type = other RNA
tccaccagccccttcgctcc

SEQ ID NO: 33223 - RNA, 20 nt, synthetic construct
  source 1..20: mol_type = other RNA
tccacccccaatgtaggtga

SEQ ID NO: 33224 - RNA, 20 nt, synthetic construct
  source 1..20: mol_type = other RNA
tccacggcctcccaacatct

SEQ ID NO: 33225 - RNA, 20 nt, synthetic construct
  source 1..20: mol_type = other RNA
tccactgggagggggtactt

SEQ ID NO: 33226 - RNA, 20 nt, synthetic construct
  source 1..20: mol_type = other RNA
tccagaccggccaggctcca

SEQ ID NO: 33227 - RNA, 20 nt, synthetic construct
  source 1..20: mol_type = other RNA
tccatcagccactgacctgc

SEQ ID NO: 33228 - RNA, 20 nt, synthetic construct
  source 1..20: mol_type = other RNA
tcccaacatctccagaccgg

SEQ ID NO: 33229 - RNA, 20 nt, synthetic construct
  source 1..20: mol_type = other RNA
tcccagtggattcactgtcc

SEQ ID NO: 33230 - RNA, 20 nt, synthetic construct
  source 1..20: mol_type = other RNA
tcccgagcaaacatgacagg

SEQ ID NO: 33231 - RNA, 20 nt, synthetic construct
  source 1..20: mol_type = other RNA
tcctgcttctagtacctctc

SEQ ID NO: 33232 - RNA, 20 nt, synthetic construct
  source 1..20: mol_type = other RNA
tccttacctgtcatgtttgc

SEQ ID NO: 33233 - RNA, 20 nt, synthetic construct
  source 1..20: mol_type = other RNA
tcgatcctgcttctagtacc

SEQ ID NO: 33234 - RNA, 20 nt, synthetic construct
  source 1..20: mol_type = other RNA
tcgctccatcagccactgac

SEQ ID NO: 33235 - RNA, 20 nt, synthetic construct
  source 1..20: mol_type = other RNA
tcgggaggtcagggcaggtt

SEQ ID NO: 33236 - RNA, 20 nt, synthetic construct
  source 1..20: mol_type = other RNA
tctagtacctctcacaggcc

SEQ ID NO: 33237 - RNA, 20 nt, synthetic construct
  source 1..20: mol_type = other RNA
tctcacaccactctccaccc

SEQ ID NO: 33238 - RNA, 20 nt, synthetic construct
  source 1..20: mol_type = other RNA
tctcacaggccctaagggtc

SEQ ID NO: 33239 - RNA, 20 nt, synthetic construct
  source 1..20: mol_type = other RNA
tctccacccccaatgtaggt

SEQ ID NO: 33240 - RNA, 20 nt, synthetic construct
  source 1..20: mol_type = other RNA
tctccagaccggccaggctc

SEQ ID NO: 33241 - RNA, 20 nt, synthetic construct
  source 1..20: mol_type = other RNA
tctggagatgttgggaggcc

SEQ ID NO: 33242 - RNA, 20 nt, synthetic construct
  source 1..20: mol_type = other RNA
tgaacctgccctgacctccc

SEQ ID NO: 33243 - RNA, 20 nt, synthetic construct
  source 1..20: mol_type = other RNA
tgaatccactgggagggggt

SEQ ID NO: 33244 - RNA, 20 nt, synthetic construct
  source 1..20: mol_type = other RNA
tgacaggtaaggacccttag

SEQ ID NO: 33245 - RNA, 20 nt, synthetic construct
  source 1..20: mol_type = other RNA
tgacctcccgagcaaacatg

SEQ ID NO: 33246 - RNA, 20 nt, synthetic construct
  source 1..20: mol_type = other RNA
tgacctgcccagcatgcctg

SEQ ID NO: 33247 - RNA, 20 nt, synthetic construct
  source 1..20: mol_type = other RNA
tgaggtgccccaggccagcc

SEQ ID NO: 33248 - RNA, 20 nt, synthetic construct
  source 1..20: mol_type = other RNA
tgatggagcgaaggggctgg

SEQ ID NO: 33249 - RNA, 20 nt, synthetic construct
  source 1..20: mol_type = other RNA
tgcccagcatgcctgaacct

SEQ ID NO: 33250 - RNA, 20 nt, synthetic construct
  source 1..20: mol_type = other RNA
tgccccaggccagccaagta

SEQ ID NO: 33251 - RNA, 20 nt, synthetic construct
  source 1..20: mol_type = other RNA
tgccctgacctcccgagcaa

SEQ ID NO: 33252 - RNA, 20 nt, synthetic construct
  source 1..20: mol_type = other RNA
tgcctgaacctgccctgacc

SEQ ID NO: 33253 - RNA, 20 nt, synthetic construct
  source 1..20: mol_type = other RNA
tgctcgggaggtcagggcag

SEQ ID NO: 33254 - RNA, 20 nt, synthetic construct
  source 1..20: mol_type = other RNA
tgctgggcaggtcagtggct

SEQ ID NO: 33255 - RNA, 20 nt, synthetic construct
  source 1..20: mol_type = other RNA
tgcttctagtacctctcaca

SEQ ID NO: 33256 - RNA, 20 nt, synthetic construct
  source 1..20: mol_type = other RNA
tggacagtgaatccactggg

SEQ ID NO: 33257 - RNA, 20 nt, synthetic construct
  source 1..20: mol_type = other RNA
tggagagtggtgtgagaata

SEQ ID NO: 33258 - RNA, 20 nt, synthetic construct
  source 1..20: mol_type = other RNA
tggagatgttgggaggccgt

SEQ ID NO: 33259 - RNA, 20 nt, synthetic construct
  source 1..20: mol_type = other RNA
tggagcctggccggtctgga

SEQ ID NO: 33260 - RNA, 20 nt, synthetic construct
  source 1..20: mol_type = other RNA
tggagcgaaggggctggtgg

SEQ ID NO: 33261 - RNA, 20 nt, synthetic construct
  source 1..20: mol_type = other RNA
tggattcactgtccacggcc

SEQ ID NO: 33262 - RNA, 20 nt, synthetic construct
  source 1..20: mol_type = other RNA
tggccggtctggagatgttg

SEQ ID NO: 33263 - RNA, 20 nt, synthetic construct
  source 1..20: mol_type = other RNA
tggcctggggcacctcacct

SEQ ID NO: 33264 - RNA, 20 nt, synthetic construct
  source 1..20: mol_type = other RNA
tggctgatggagcgaagggg

SEQ ID NO: 33265 - RNA, 20 nt, synthetic construct
  source 1..20: mol_type = other RNA
tggctggcctggggcacctc

SEQ ID NO: 33266 - RNA, 20 nt, synthetic construct
  source 1..20: mol_type = other RNA
tgggaggccgtggacagtga

SEQ ID NO: 33267 - RNA, 20 nt, synthetic construct
  source 1..20: mol_type = other RNA
tgggagggggtacttggctg

SEQ ID NO: 33268 - RNA, 20 nt, synthetic construct
  source 1..20: mol_type = other RNA
tgggcaggtcagtggctgat

SEQ ID NO: 33269 - RNA, 20 nt, synthetic construct
  source 1..20: mol_type = other RNA
tggggcacctcacctacatt

SEQ ID NO: 33270 - RNA, 20 nt, synthetic construct
  source 1..20: mol_type = other RNA
tgggggtggagagtggtgtg

SEQ ID NO: 33271 - RNA, 20 nt, synthetic construct
  source 1..20: mol_type = other RNA
tggtggagcctggccggtct

SEQ ID NO: 33272 - RNA, 20 nt, synthetic construct
  source 1..20: mol_type = other RNA
tggttattctcacaccactc

SEQ ID NO: 33273 - RNA, 20 nt, synthetic construct
  source 1..20: mol_type = other RNA
tgtaggtgaggtgccccagg

SEQ ID NO: 33274 - RNA, 20 nt, synthetic construct
  source 1..20: mol_type = other RNA
tgtcatgtttgctcgggagg

SEQ ID NO: 33275 - RNA, 20 nt, synthetic construct
  source 1..20: mol_type = other RNA
tgtccacggcctcccaacat

SEQ ID NO: 33276 - RNA, 20 nt, synthetic construct
  source 1..20: mol_type = other RNA
tgttgggaggccgtggacag

SEQ ID NO: 33277 - RNA, 20 nt, synthetic construct
  source 1..20: mol_type = other RNA
tgtttgctcgggaggtcagg

SEQ ID NO: 33278 - RNA, 20 nt, synthetic construct
  source 1..20: mol_type = other RNA
ttacctgtcatgtttgctcg

SEQ ID NO: 33279 - RNA, 20 nt, synthetic construct
  source 1..20: mol_type = other RNA
ttagggcctgtgagaggtac

SEQ ID NO: 33280 - RNA, 20 nt, synthetic construct
  source 1..20: mol_type = other RNA
ttattctcacaccactctcc

SEQ ID NO: 33281 - RNA, 20 nt, synthetic construct
  source 1..20: mol_type = other RNA
ttcactgtccacggcctccc

SEQ ID NO: 33282 - RNA, 20 nt, synthetic construct
  source 1..20: mol_type = other RNA
ttcaggcatgctgggcaggt

SEQ ID NO: 33283 - RNA, 20 nt, synthetic construct
  source 1..20: mol_type = other RNA
ttcgctccatcagccactga

SEQ ID NO: 33284 - RNA, 20 nt, synthetic construct
  source 1..20: mol_type = other RNA
ttctagtacctctcacaggc

SEQ ID NO: 33285 - RNA, 20 nt, synthetic construct
  source 1..20: mol_type = other RNA
ttctcacaccactctccacc

SEQ ID NO: 33286 - RNA, 20 nt, synthetic construct
  source 1..20: mol_type = other RNA
ttgctcgggaggtcagggca

SEQ ID NO: 33287 - RNA, 20 nt, synthetic construct
  source 1..20: mol_type = other RNA
ttggctggcctggggcacct

SEQ ID NO: 33288 - RNA, 20 nt, synthetic construct
  source 1..20: mol_type = other RNA
ttgggaggccgtggacagtg

SEQ ID NO: 33289 - RNA, 20 nt, synthetic construct
  source 1..20: mol_type = other RNA
ttgggggtggagagtggtgt

SEQ ID NO: 33290 - RNA, 20 nt, synthetic construct
  source 1..20: mol_type = other RNA
tttgctcgggaggtcagggc

SEQ ID NO: 33291 - RNA, 21 nt, synthetic construct
  source 1..21: mol_type = other RNA
aaacatgacaggtaaggaccc

SEQ ID NO: 33292 - RNA, 21 nt, synthetic construct
  source 1..21: mol_type = other RNA
aacatctccagaccggccagg

SEQ ID NO: 33293 - RNA, 21 nt, synthetic construct
  source 1..21: mol_type = other RNA
aacatgacaggtaaggaccct

SEQ ID NO: 33294 - RNA, 21 nt, synthetic construct
  source 1..21: mol_type = other RNA
aacctgccctgacctcccgag

SEQ ID NO: 33295 - RNA, 21 nt, synthetic construct
  source 1..21: mol_type = other RNA
aaggacccttagggcctgtga

SEQ ID NO: 33296 - RNA, 21 nt, synthetic construct
  source 1..21: mol_type = other RNA
aaggggctggtggagcctggc

SEQ ID NO: 33297 - RNA, 21 nt, synthetic construct
  source 1..21: mol_type = other RNA
aagggtccttacctgtcatgt

SEQ ID NO: 33298 - RNA, 21 nt, synthetic construct
  source 1..21: mol_type = other RNA
aagtaccccctcccagtggat

SEQ ID NO: 33299 - RNA, 21 nt, synthetic construct
  source 1..21: mol_type = other RNA
aatacctggttattctcacac

SEQ ID NO: 33300 - RNA, 21 nt, synthetic construct
  source 1..21: mol_type = other RNA
aatcaatacctggttattctc

SEQ ID NO: 33301 - RNA, 21 nt, synthetic construct
  source 1..21: mol_type = other RNA
aatccactgggagggggtact

SEQ ID NO: 33302 - RNA, 21 nt, synthetic construct
  source 1..21: mol_type = other RNA
aatgtaggtgaggtgccccag

SEQ ID NO: 33303 - RNA, 21 nt, synthetic construct
  source 1..21: mol_type = other RNA
acaccactctccacccccaat

SEQ ID NO: 33304 - RNA, 21 nt, synthetic construct
  source 1..21: mol_type = other RNA
acaggccctaagggtccttac

SEQ ID NO: 33305 - RNA, 21 nt, synthetic construct
  source 1..21: mol_type = other RNA
acaggtaaggacccttagggc

SEQ ID NO: 33306 - RNA, 21 nt, synthetic construct
  source 1..21: mol_type = other RNA
acagtgaatccactgggaggg

SEQ ID NO: 33307 - RNA, 21 nt, synthetic construct
  source 1..21: mol_type = other RNA
acatctccagaccggccaggc

SEQ ID NO: 33308 - RNA, 21 nt, synthetic construct
  source 1..21: mol_type = other RNA
acatgacaggtaaggaccctt

SEQ ID NO: 33309 - RNA, 21 nt, synthetic construct
  source 1..21: mol_type = other RNA
acattgggggtggagagtggt

SEQ ID NO: 33310 - RNA, 21 nt, synthetic construct
  source 1..21: mol_type = other RNA
accactctccacccccaatgt

SEQ ID NO: 33311 - RNA, 21 nt, synthetic construct
  source 1..21: mol_type = other RNA
accagccccttcgctccatca

SEQ ID NO: 33312 - RNA, 21 nt, synthetic construct
  source 1..21: mol_type = other RNA
acccccaatgtaggtgaggtg

SEQ ID NO: 33313 - RNA, 21 nt, synthetic construct
  source 1..21: mol_type = other RNA
accccctcccagtggattcac

SEQ ID NO: 33314 - RNA, 21 nt, synthetic construct
  source 1..21: mol_type = other RNA
acccttagggcctgtgagagg

SEQ ID NO: 33315 - RNA, 21 nt, synthetic construct
  source 1..21: mol_type = other RNA
accggccaggctccaccagcc

SEQ ID NO: 33316 - RNA, 21 nt, synthetic construct
  source 1..21: mol_type = other RNA
acctacattgggggtggagag

SEQ ID NO: 33317 - RNA, 21 nt, synthetic construct
  source 1..21: mol_type = other RNA
acctcacctacattgggggtg

SEQ ID NO: 33318 - RNA, 21 nt, synthetic construct
  source 1..21: mol_type = other RNA
acctcccgagcaaacatgaca

SEQ ID NO: 33319 - RNA, 21 nt, synthetic construct
  source 1..21: mol_type = other RNA
acctctcacaggccctaaggg

SEQ ID NO: 33320 - RNA, 21 nt, synthetic construct
  source 1..21: mol_type = other RNA
acctgcccagcatgcctgaac

SEQ ID NO: 33321 - RNA, 21 nt, synthetic construct
  source 1..21: mol_type = other RNA
acctgccctgacctcccgagc

SEQ ID NO: 33322 - RNA, 21 nt, synthetic construct
  source 1..21: mol_type = other RNA
acctggttattctcacaccac

SEQ ID NO: 33323 - RNA, 21 nt, synthetic construct
  source 1..21: mol_type = other RNA
acctgtcatgtttgctcggga

SEQ ID NO: 33324 - RNA, 21 nt, synthetic construct
  source 1..21: mol_type = other RNA
acggcctcccaacatctccag

SEQ ID NO: 33325 - RNA, 21 nt, synthetic construct
  source 1..21: mol_type = other RNA
actctccacccccaatgtagg

SEQ ID NO: 33326 - RNA, 21 nt, synthetic construct
  source 1..21: mol_type = other RNA
actgacctgcccagcatgcct

SEQ ID NO: 33327 - RNA, 21 nt, synthetic construct
  source 1..21: mol_type = other RNA
actgggagggggtacttggct

SEQ ID NO: 33328 - RNA, 21 nt, synthetic construct
  source 1..21: mol_type = other RNA
actgtccacggcctcccaaca

SEQ ID NO: 33329 - RNA, 21 nt, synthetic construct
  source 1..21: mol_type = other RNA
acttggctggcctggggcacc

SEQ ID NO: 33330 - RNA, 21 nt, synthetic construct
  source 1..21: mol_type = other RNA
agaccggccaggctccaccag

SEQ ID NO: 33331 - RNA, 21 nt, synthetic construct
  source 1..21: mol_type = other RNA
agagtggtgtgagaataacca

SEQ ID NO: 33332 - RNA, 21 nt, synthetic construct
  source 1..21: mol_type = other RNA
agatgttgggaggccgtggac

SEQ ID NO: 33333 - RNA, 21 nt, synthetic construct
  source 1..21: mol_type = other RNA
agcaaacatgacaggtaagga

SEQ ID NO: 33334 - RNA, 21 nt, synthetic construct
  source 1..21: mol_type = other RNA
agcatgcctgaacctgccctg

SEQ ID NO: 33335 - RNA, 21 nt, synthetic construct
  source 1..21: mol_type = other RNA
agccaagtaccccctcccagt

SEQ ID NO: 33336 - RNA, 21 nt, synthetic construct
  source 1..21: mol_type = other RNA
agccactgacctgcccagcat

SEQ ID NO: 33337 - RNA, 21 nt, synthetic construct
  source 1..21: mol_type = other RNA
agccccttcgctccatcagcc

SEQ ID NO: 33338 - RNA, 21 nt, synthetic construct
  source 1..21: mol_type = other RNA
agcctggccggtctggagatg

SEQ ID NO: 33339 - RNA, 21 nt, synthetic construct
  source 1..21: mol_type = other RNA
agcgaaggggctggtggagcc

SEQ ID NO: 33340 - RNA, 21 nt, synthetic construct
  source 1..21: mol_type = other RNA
aggacccttagggcctgtgag

SEQ ID NO: 33341 - RNA, 21 nt, synthetic construct
  source 1..21: mol_type = other RNA
aggcatgctgggcaggtcagt

SEQ ID NO: 33342 - RNA, 21 nt, synthetic construct
  source 1..21: mol_type = other RNA
aggccagccaagtaccccctc

SEQ ID NO: 33343 - RNA, 21 nt, synthetic construct
  source 1..21: mol_type = other RNA
aggccctaagggtccttacct

SEQ ID NO: 33344 - RNA, 21 nt, synthetic construct
  source 1..21: mol_type = other RNA
aggccgtggacagtgaatcca

SEQ ID NO: 33345 - RNA, 21 nt, synthetic construct
  source 1..21: mol_type = other RNA
aggctccaccagccccttcgc

SEQ ID NO: 33346 - RNA, 21 nt, synthetic construct
  source 1..21: mol_type = other RNA
agggcaggttcaggcatgctg

SEQ ID NO: 33347 - RNA, 21 nt, synthetic construct
  source 1..21: mol_type = other RNA
agggcctgtgagaggtactag

SEQ ID NO: 33348 - RNA, 21 nt, synthetic construct
  source 1..21: mol_type = other RNA
aggggctggtggagcctggcc

SEQ ID NO: 33349 - RNA, 21 nt, synthetic construct
  source 1..21: mol_type = other RNA
agggggtacttggctggcctg

SEQ ID NO: 33350 - RNA, 21 nt, synthetic construct
  source 1..21: mol_type = other RNA
agggtccttacctgtcatgtt

SEQ ID NO: 33351 - RNA, 21 nt, synthetic construct
  source 1..21: mol_type = other RNA
aggtaaggacccttagggcct

SEQ ID NO: 33352 - RNA, 21 nt, synthetic construct
  source 1..21: mol_type = other RNA
aggtcagggcaggttcaggca

SEQ ID NO: 33353 - RNA, 21 nt, synthetic construct
  source 1..21: mol_type = other RNA
aggtcagtggctgatggagcg

SEQ ID NO: 33354 - RNA, 21 nt, synthetic construct
  source 1..21: mol_type = other RNA
aggtgaggtgccccaggccag

SEQ ID NO: 33355 - RNA, 21 nt, synthetic construct
  source 1..21: mol_type = other RNA
aggtgccccaggccagccaag

SEQ ID NO: 33356 - RNA, 21 nt, synthetic construct
  source 1..21: mol_type = other RNA
aggttcaggcatgctgggcag

SEQ ID NO: 33357 - RNA, 21 nt, synthetic construct
  source 1..21: mol_type = other RNA
agtaccccctcccagtggatt

SEQ ID NO: 33358 - RNA, 21 nt, synthetic construct
  source 1..21: mol_type = other RNA
agtacctctcacaggccctaa

SEQ ID NO: 33359 - RNA, 21 nt, synthetic construct
  source 1..21: mol_type = other RNA
agtgaatccactgggaggggg

SEQ ID NO: 33360 - RNA, 21 nt, synthetic construct
  source 1..21: mol_type = other RNA
agtggattcactgtccacggc

SEQ ID NO: 33361 - RNA, 21 nt, synthetic construct
  source 1..21: mol_type = other RNA
agtggctgatggagcgaaggg

SEQ ID NO: 33362 - RNA, 21 nt, synthetic construct
  source 1..21: mol_type = other RNA
agtggtgtgagaataaccagg

SEQ ID NO: 33363 - RNA, 21 nt, synthetic construct
  source 1..21: mol_type = other RNA
atacctggttattctcacacc

SEQ ID NO: 33364 - RNA, 21 nt, synthetic construct
  source 1..21: mol_type = other RNA
atcaatacctggttattctca

SEQ ID NO: 33365 - RNA, 21 nt, synthetic construct
  source 1..21: mol_type = other RNA
atcagccactgacctgcccag

SEQ ID NO: 33366 - RNA, 21 nt, synthetic construct
  source 1..21: mol_type = other RNA
atccactgggagggggtactt

SEQ ID NO: 33367 - RNA, 21 nt, synthetic construct
  source 1..21: mol_type = other RNA
atcctgcttctagtacctctc

SEQ ID NO: 33368 - RNA, 21 nt, synthetic construct
  source 1..21: mol_type = other RNA
atctccagaccggccaggctc

SEQ ID NO: 33369 - RNA, 21 nt, synthetic construct
  source 1..21: mol_type = other RNA
atgacaggtaaggacccttag

SEQ ID NO: 33370 - RNA, 21 nt, synthetic construct
  source 1..21: mol_type = other RNA
atgcctgaacctgccctgacc

SEQ ID NO: 33371 - RNA, 21 nt, synthetic construct
  source 1..21: mol_type = other RNA
atgctgggcaggtcagtggct

SEQ ID NO: 33372 - RNA, 21 nt, synthetic construct
  source 1..21: mol_type = other RNA
atggagcgaaggggctggtgg

SEQ ID NO: 33373 - RNA, 21 nt, synthetic construct
  source 1..21: mol_type = other RNA
atgtaggtgaggtgccccagg

SEQ ID NO: 33374 - RNA, 21 nt, synthetic construct
  source 1..21: mol_type = other RNA
atgttgggaggccgtggacag

SEQ ID NO: 33375 - RNA, 21 nt, synthetic construct
  source 1..21: mol_type = other RNA
atgtttgctcgggaggtcagg

SEQ ID NO: 33376 - RNA, 21 nt, synthetic construct
  source 1..21: mol_type = other RNA
attcactgtccacggcctccc

SEQ ID NO: 33377 - RNA, 21 nt, synthetic construct
  source 1..21: mol_type = other RNA
attctcacaccactctccacc

SEQ ID NO: 33378 - RNA, 21 nt, synthetic construct
  source 1..21: mol_type = other RNA
attgggggtggagagtggtgt

SEQ ID NO: 33379 - RNA, 21 nt, synthetic construct
  source 1..21: mol_type = other RNA
caaacatgacaggtaaggacc

SEQ ID NO: 33380 - RNA, 21 nt, synthetic construct
  source 1..21: mol_type = other RNA
caacatctccagaccggccag

SEQ ID NO: 33381 - RNA, 21 nt, synthetic construct
  source 1..21: mol_type = other RNA
caagtaccccctcccagtgga

SEQ ID NO: 33382 - RNA, 21 nt, synthetic construct
  source 1..21: mol_type = other RNA
caatacctggttattctcaca

SEQ ID NO: 33383 - RNA, 21 nt, synthetic construct
  source 1..21: mol_type = other RNA
caatgtaggtgaggtgcccca

SEQ ID NO: 33384 - RNA, 21 nt, synthetic construct
  source 1..21: mol_type = other RNA
cacaccactctccacccccaa

SEQ ID NO: 33385 - RNA, 21 nt, synthetic construct
  source 1..21: mol_type = other RNA
cacaggccctaagggtcctta

SEQ ID NO: 33386 - RNA, 21 nt, synthetic construct
  source 1..21: mol_type = other RNA
caccactctccacccccaatg

SEQ ID NO: 33387 - RNA, 21 nt, synthetic construct
  source 1..21: mol_type = other RNA
caccagccccttcgctccatc

SEQ ID NO: 33388 - RNA, 21 nt, synthetic construct
  source 1..21: mol_type = other RNA
cacccccaatgtaggtgaggt

SEQ ID NO: 33389 - RNA, 21 nt, synthetic construct
  source 1..21: mol_type = other RNA
cacctacattgggggtggaga

SEQ ID NO: 33390 - RNA, 21 nt, synthetic construct
  source 1..21: mol_type = other RNA
cacctcacctacattgggggt

SEQ ID NO: 33391 - RNA, 21 nt, synthetic construct
  source 1..21: mol_type = other RNA
cacggcctcccaacatctcca

SEQ ID NO: 33392 - RNA, 21 nt, synthetic construct
  source 1..21: mol_type = other RNA
cactctccacccccaatgtag

SEQ ID NO: 33393 - RNA, 21 nt, synthetic construct
  source 1..21: mol_type = other RNA
cactgacctgcccagcatgcc

SEQ ID NO: 33394 - RNA, 21 nt, synthetic construct
  source 1..21: mol_type = other RNA
cactgggagggggtacttggc

SEQ ID NO: 33395 - RNA, 21 nt, synthetic construct
  source 1..21: mol_type = other RNA
cactgtccacggcctcccaac

SEQ ID NO: 33396 - RNA, 21 nt, synthetic construct
  source 1..21: mol_type = other RNA
cagaccggccaggctccacca

SEQ ID NO: 33397 - RNA, 21 nt, synthetic construct
  source 1..21: mol_type = other RNA
cagcatgcctgaacctgccct

SEQ ID NO: 33398 - RNA, 21 nt, synthetic construct
  source 1..21: mol_type = other RNA
cagccaagtaccccctcccag

SEQ ID NO: 33399 - RNA, 21 nt, synthetic construct
  source 1..21: mol_type = other RNA
cagccactgacctgcccagca

SEQ ID NO: 33400 - RNA, 21 nt, synthetic construct
  source 1..21: mol_type = other RNA
cagccccttcgctccatcagc

SEQ ID NO: 33401 - RNA, 21 nt, synthetic construct
  source 1..21: mol_type = other RNA
caggcatgctgggcaggtcag

SEQ ID NO: 33402 - RNA, 21 nt, synthetic construct
  source 1..21: mol_type = other RNA
caggccagccaagtaccccct

SEQ ID NO: 33403 - RNA, 21 nt, synthetic construct
  source 1..21: mol_type = other RNA
caggccctaagggtccttacc

SEQ ID NO: 33404 - RNA, 21 nt, synthetic construct
  source 1..21: mol_type = other RNA
caggctccaccagccccttcg

SEQ ID NO: 33405 - RNA, 21 nt, synthetic construct
  source 1..21: mol_type = other RNA
cagggcaggttcaggcatgct

SEQ ID NO: 33406 - RNA, 21 nt, synthetic construct
  source 1..21: mol_type = other RNA
caggtaaggacccttagggcc

SEQ ID NO: 33407 - RNA, 21 nt, synthetic construct
  source 1..21: mol_type = other RNA
caggtcagtggctgatggagc

SEQ ID NO: 33408 - RNA, 21 nt, synthetic construct
  source 1..21: mol_type = other RNA
caggttcaggcatgctgggca

SEQ ID NO: 33409 - RNA, 21 nt, synthetic construct
  source 1..21: mol_type = other RNA
cagtgaatccactgggagggg

SEQ ID NO: 33410 - RNA, 21 nt, synthetic construct
  source 1..21: mol_type = other RNA
cagtggattcactgtccacgg

SEQ ID NO: 33411 - RNA, 21 nt, synthetic construct
  source 1..21: mol_type = other RNA
cagtggctgatggagcgaagg

SEQ ID NO: 33412 - RNA, 21 nt, synthetic construct
  source 1..21: mol_type = other RNA
catcagccactgacctgccca

SEQ ID NO: 33413 - RNA, 21 nt, synthetic construct
  source 1..21: mol_type = other RNA
catctccagaccggccaggct

SEQ ID NO: 33414 - RNA, 21 nt, synthetic construct
  source 1..21: mol_type = other RNA
catgacaggtaaggaccctta

SEQ ID NO: 33415 - RNA, 21 nt, synthetic construct
  source 1..21: mol_type = other RNA
catgcctgaacctgccctgac

SEQ ID NO: 33416 - RNA, 21 nt, synthetic construct
  source 1..21: mol_type = other RNA
catgctgggcaggtcagtggc

SEQ ID NO: 33417 - RNA, 21 nt, synthetic construct
  source 1..21: mol_type = other RNA
catgtttgctcgggaggtcag

SEQ ID NO: 33418 - RNA, 21 nt, synthetic construct
  source 1..21: mol_type = other RNA
cattgggggtggagagtggtg

SEQ ID NO: 33419 - RNA, 21 nt, synthetic construct
  source 1..21: mol_type = other RNA
ccaacatctccagaccggcca

SEQ ID NO: 33420 - RNA, 21 nt, synthetic construct
  source 1..21: mol_type = other RNA
ccaagtaccccctcccagtgg

SEQ ID NO: 33421 - RNA, 21 nt, synthetic construct
  source 1..21: mol_type = other RNA
ccaatgtaggtgaggtgcccc

SEQ ID NO: 33422 - RNA, 21 nt, synthetic construct
  source 1..21: mol_type = other RNA
ccaccagccccttcgctccat

SEQ ID NO: 33423 - RNA, 21 nt, synthetic construct
  source 1..21: mol_type = other RNA
ccacccccaatgtaggtgagg

SEQ ID NO: 33424 - RNA, 21 nt, synthetic construct
  source 1..21: mol_type = other RNA
ccacggcctcccaacatctcc

SEQ ID NO: 33425 - RNA, 21 nt, synthetic construct
  source 1..21: mol_type = other RNA
ccactctccacccccaatgta

SEQ ID NO: 33426 - RNA, 21 nt, synthetic construct
  source 1..21: mol_type = other RNA
ccactgacctgcccagcatgc

SEQ ID NO: 33427 - RNA, 21 nt, synthetic construct
  source 1..21: mol_type = other RNA
ccactgggagggggtacttgg

SEQ ID NO: 33428 - RNA, 21 nt, synthetic construct
  source 1..21: mol_type = other RNA
ccagaccggccaggctccacc

SEQ ID NO: 33429 - RNA, 21 nt, synthetic construct
  source 1..21: mol_type = other RNA
ccagcatgcctgaacctgccc

SEQ ID NO: 33430 - RNA, 21 nt, synthetic construct
  source 1..21: mol_type = other RNA
ccagccaagtaccccctccca

SEQ ID NO: 33431 - RNA, 21 nt, synthetic construct
  source 1..21: mol_type = other RNA
ccagccccttcgctccatcag

SEQ ID NO: 33432 - RNA, 21 nt, synthetic construct
  source 1..21: mol_type = other RNA
ccaggccagccaagtaccccc

SEQ ID NO: 33433 - RNA, 21 nt, synthetic construct
  source 1..21: mol_type = other RNA
ccaggctccaccagccccttc

SEQ ID NO: 33434 - RNA, 21 nt, synthetic construct
  source 1..21: mol_type = other RNA
ccagtggattcactgtccacg

SEQ ID NO: 33435 - RNA, 21 nt, synthetic construct
  source 1..21: mol_type = other RNA
ccatcagccactgacctgccc

SEQ ID NO: 33436 - RNA, 21 nt, synthetic construct
  source 1..21: mol_type = other RNA
cccaacatctccagaccggcc

SEQ ID NO: 33437 - RNA, 21 nt, synthetic construct
  source 1..21: mol_type = other RNA
cccaatgtaggtgaggtgccc

SEQ ID NO: 33438 - RNA, 21 nt, synthetic construct
  source 1..21: mol_type = other RNA
cccagcatgcctgaacctgcc

SEQ ID NO: 33439 - RNA, 21 nt, synthetic construct
  source 1..21: mol_type = other RNA
cccaggccagccaagtacccc

SEQ ID NO: 33440 - RNA, 21 nt, synthetic construct
  source 1..21: mol_type = other RNA
cccagtggattcactgtccac

SEQ ID NO: 33441 - RNA, 21 nt, synthetic construct
  source 1..21: mol_type = other RNA
ccccaatgtaggtgaggtgcc

SEQ ID NO: 33442 - RNA, 21 nt, synthetic construct
  source 1..21: mol_type = other RNA
ccccaggccagccaagtaccc

SEQ ID NO: 33443 - RNA, 21 nt, synthetic construct
  source 1..21: mol_type = other RNA
cccccaatgtaggtgaggtgc

SEQ ID NO: 33444 - RNA, 21 nt, synthetic construct
  source 1..21: mol_type = other RNA
ccccctcccagtggattcact

SEQ ID NO: 33445 - RNA, 21 nt, synthetic construct
  source 1..21: mol_type = other RNA
cccctcccagtggattcactg

SEQ ID NO: 33446 - RNA, 21 nt, synthetic construct
  source 1..21: mol_type = other RNA
ccccttcgctccatcagccac

SEQ ID NO: 33447 - RNA, 21 nt, synthetic construct
  source 1..21: mol_type = other RNA
cccgagcaaacatgacaggta

SEQ ID NO: 33448 - RNA, 21 nt, synthetic construct
  source 1..21: mol_type = other RNA
ccctaagggtccttacctgtc

SEQ ID NO: 33449 - RNA, 21 nt, synthetic construct
  source 1..21: mol_type = other RNA
ccctcccagtggattcactgt

SEQ ID NO: 33450 - RNA, 21 nt, synthetic construct
  source 1..21: mol_type = other RNA
ccctgacctcccgagcaaaca

SEQ ID NO: 33451 - RNA, 21 nt, synthetic construct
  source 1..21: mol_type = other RNA
cccttagggcctgtgagaggt

SEQ ID NO: 33452 - RNA, 21 nt, synthetic construct
  source 1..21: mol_type = other RNA
cccttcgctccatcagccact

SEQ ID NO: 33453 - RNA, 21 nt, synthetic construct
  source 1..21: mol_type = other RNA
ccgagcaaacatgacaggtaa

SEQ ID NO: 33454 - RNA, 21 nt, synthetic construct
  source 1..21: mol_type = other RNA
ccggtctggagatgttgggag

SEQ ID NO: 33455 - RNA, 21 nt, synthetic construct
  source 1..21: mol_type = other RNA
ccgtggacagtgaatccactg

SEQ ID NO: 33456 - RNA, 21 nt, synthetic construct
  source 1..21: mol_type = other RNA
cctaagggtccttacctgtca

SEQ ID NO: 33457 - RNA, 21 nt, synthetic construct
  source 1..21: mol_type = other RNA
cctacattgggggtggagagt

SEQ ID NO: 33458 - RNA, 21 nt, synthetic construct
  source 1..21: mol_type = other RNA
cctcacctacattgggggtgg

SEQ ID NO: 33459 - RNA, 21 nt, synthetic construct
  source 1..21: mol_type = other RNA
cctcccaacatctccagaccg

SEQ ID NO: 33460 - RNA, 21 nt, synthetic construct
  source 1..21: mol_type = other RNA
cctcccagtggattcactgtc

SEQ ID NO: 33461 - RNA, 21 nt, synthetic construct
  source 1..21: mol_type = other RNA
cctcccgagcaaacatgacag

SEQ ID NO: 33462 - RNA, 21 nt, synthetic construct
  source 1..21: mol_type = other RNA
cctctcacaggccctaagggt

SEQ ID NO: 33463 - RNA, 21 nt, synthetic construct
  source 1..21: mol_type = other RNA
cctgaacctgccctgacctcc

SEQ ID NO: 33464 - RNA, 21 nt, synthetic construct
  source 1..21: mol_type = other RNA
cctgacctcccgagcaaacat

SEQ ID NO: 33465 - RNA, 21 nt, synthetic construct
  source 1..21: mol_type = other RNA
cctgcccagcatgcctgaacc

SEQ ID NO: 33466 - RNA, 21 nt, synthetic construct
  source 1..21: mol_type = other RNA
cctgccctgacctcccgagca

SEQ ID NO: 33467 - RNA, 21 nt, synthetic construct
  source 1..21: mol_type = other RNA
cctgcttctagtacctctcac

SEQ ID NO: 33468 - RNA, 21 nt, synthetic construct
  source 1..21: mol_type = other RNA
cctggccggtctggagatgtt

SEQ ID NO: 33469 - RNA, 21 nt, synthetic construct
  source 1..21: mol_type = other RNA
cctggggcacctcacctacat

SEQ ID NO: 33470 - RNA, 21 nt, synthetic construct
  source 1..21: mol_type = other RNA
cctggttattctcacaccact

SEQ ID NO: 33471 - RNA, 21 nt, synthetic construct
  source 1..21: mol_type = other RNA
cctgtcatgtttgctcgggag

SEQ ID NO: 33472 - RNA, 21 nt, synthetic construct
  source 1..21: mol_type = other RNA
cctgtgagaggtactagaagc

SEQ ID NO: 33473 - RNA, 21 nt, synthetic construct
  source 1..21: mol_type = other RNA
ccttacctgtcatgtttgctc

SEQ ID NO: 33474 - RNA, 21 nt, synthetic construct
  source 1..21: mol_type = other RNA
ccttagggcctgtgagaggta

SEQ ID NO: 33475 - RNA, 21 nt, synthetic construct
  source 1..21: mol_type = other RNA
ccttcgctccatcagccactg

SEQ ID NO: 33476 - RNA, 21 nt, synthetic construct
  source 1..21: mol_type = other RNA
cgaaggggctggtggagcctg

SEQ ID NO: 33477 - RNA, 21 nt, synthetic construct
  source 1..21: mol_type = other RNA
cgagcaaacatgacaggtaag

SEQ ID NO: 33478 - RNA, 21 nt, synthetic construct
  source 1..21: mol_type = other RNA
cgatcctgcttctagtacctc

SEQ ID NO: 33479 - RNA, 21 nt, synthetic construct
  source 1..21: mol_type = other RNA
cgctccatcagccactgacct

SEQ ID NO: 33480 - RNA, 21 nt, synthetic construct
  source 1..21: mol_type = other RNA
cggcctcccaacatctccaga

SEQ ID NO: 33481 - RNA, 21 nt, synthetic construct
  source 1..21: mol_type = other RNA
cgggaggtcagggcaggttca

SEQ ID NO: 33482 - RNA, 21 nt, synthetic construct
  source 1..21: mol_type = other RNA
cggtctggagatgttgggagg

SEQ ID NO: 33483 - RNA, 21 nt, synthetic construct
  source 1..21: mol_type = other RNA
cgtggacagtgaatccactgg

SEQ ID NO: 33484 - RNA, 21 nt, synthetic construct
  source 1..21: mol_type = other RNA
ctaagggtccttacctgtcat

SEQ ID NO: 33485 - RNA, 21 nt, synthetic construct
  source 1..21: mol_type = other RNA
ctacattgggggtggagagtg

SEQ ID NO: 33486 - RNA, 21 nt, synthetic construct
  source 1..21: mol_type = other RNA
ctagtacctctcacaggccct

SEQ ID NO: 33487 - RNA, 21 nt, synthetic construct
  source 1..21: mol_type = other RNA
ctcacaccactctccaccccc

SEQ ID NO: 33488 - RNA, 21 nt, synthetic construct
  source 1..21: mol_type = other RNA
ctcacaggccctaagggtcct

SEQ ID NO: 33489 - RNA, 21 nt, synthetic construct
  source 1..21: mol_type = other RNA
ctcacctacattgggggtgga

SEQ ID NO: 33490 - RNA, 21 nt, synthetic construct
  source 1..21: mol_type = other RNA
ctccaccagccccttcgctcc

SEQ ID NO: 33491 - RNA, 21 nt, synthetic construct
  source 1..21: mol_type = other RNA
ctccacccccaatgtaggtga

SEQ ID NO: 33492 - RNA, 21 nt, synthetic construct
  source 1..21: mol_type = other RNA
ctccagaccggccaggctcca

SEQ ID NO: 33493 - RNA, 21 nt, synthetic construct
  source 1..21: mol_type = other RNA
ctccatcagccactgacctgc

SEQ ID NO: 33494 - RNA, 21 nt, synthetic construct
  source 1..21: mol_type = other RNA
ctcccaacatctccagaccgg

SEQ ID NO: 33495 - RNA, 21 nt, synthetic construct
  source 1..21: mol_type = other RNA
ctcccagtggattcactgtcc

SEQ ID NO: 33496 - RNA, 21 nt, synthetic construct
  source 1..21: mol_type = other RNA
ctcccgagcaaacatgacagg

SEQ ID NO: 33497 - RNA, 21 nt, synthetic construct
  source 1..21: mol_type = other RNA
ctcgggaggtcagggcaggtt

SEQ ID NO: 33498 - RNA, 21 nt, synthetic construct
  source 1..21: mol_type = other RNA
ctctcacaggccctaagggtc

SEQ ID NO: 33499 - RNA, 21 nt, synthetic construct
  source 1..21: mol_type = other RNA
ctctccacccccaatgtaggt

SEQ ID NO: 33500 - RNA, 21 nt, synthetic construct
  source 1..21: mol_type = other RNA
ctgaacctgccctgacctccc

SEQ ID NO: 33501 - RNA, 21 nt, synthetic construct
  source 1..21: mol_type = other RNA
ctgacctcccgagcaaacatg

SEQ ID NO: 33502 - RNA, 21 nt, synthetic construct
  source 1..21: mol_type = other RNA
ctgacctgcccagcatgcctg

SEQ ID NO: 33503 - RNA, 21 nt, synthetic construct
  source 1..21: mol_type = other RNA
ctgatggagcgaaggggctgg

SEQ ID NO: 33504 - RNA, 21 nt, synthetic construct
  source 1..21: mol_type = other RNA
ctgcccagcatgcctgaacct

SEQ ID NO: 33505 - RNA, 21 nt, synthetic construct
  source 1..21: mol_type = other RNA
ctgccctgacctcccgagcaa

SEQ ID NO: 33506 - RNA, 21 nt, synthetic construct
  source 1..21: mol_type = other RNA
ctgcttctagtacctctcaca

SEQ ID NO: 33507 - RNA, 21 nt, synthetic construct
  source 1..21: mol_type = other RNA
ctggagatgttgggaggccgt

SEQ ID NO: 33508 - RNA, 21 nt, synthetic construct
  source 1..21: mol_type = other RNA
ctggccggtctggagatgttg

SEQ ID NO: 33509 - RNA, 21 nt, synthetic construct
  source 1..21: mol_type = other RNA
ctggcctggggcacctcacct

SEQ ID NO: 33510 - RNA, 21 nt, synthetic construct
  source 1..21: mol_type = other RNA
ctgggagggggtacttggctg

SEQ ID NO: 33511 - RNA, 21 nt, synthetic construct
  source 1..21: mol_type = other RNA
ctgggcaggtcagtggctgat

SEQ ID NO: 33512 - RNA, 21 nt, synthetic construct
  source 1..21: mol_type = other RNA
ctggggcacctcacctacatt

SEQ ID NO: 33513 - RNA, 21 nt, synthetic construct
  source 1..21: mol_type = other RNA
ctggtggagcctggccggtct

SEQ ID NO: 33514 - RNA, 21 nt, synthetic construct
  source 1..21: mol_type = other RNA
ctggttattctcacaccactc

SEQ ID NO: 33515 - RNA, 21 nt, synthetic construct
  source 1..21: mol_type = other RNA
ctgtcatgtttgctcgggagg

SEQ ID NO: 33516 - RNA, 21 nt, synthetic construct
  source 1..21: mol_type = other RNA
ctgtccacggcctcccaacat

SEQ ID NO: 33517 - RNA, 21 nt, synthetic construct
  source 1..21: mol_type = other RNA
cttacctgtcatgtttgctcg

SEQ ID NO: 33518 - RNA, 21 nt, synthetic construct
  source 1..21: mol_type = other RNA
cttagggcctgtgagaggtac

SEQ ID NO: 33519 - RNA, 21 nt, synthetic construct
  source 1..21: mol_type = other RNA
cttcgctccatcagccactga

SEQ ID NO: 33520 - RNA, 21 nt, synthetic construct
  source 1..21: mol_type = other RNA
cttctagtacctctcacaggc

SEQ ID NO: 33521 - RNA, 21 nt, synthetic construct
  source 1..21: mol_type = other RNA
cttggctggcctggggcacct

SEQ ID NO: 33522 - RNA, 21 nt, synthetic construct
  source 1..21: mol_type = other RNA
gaacctgccctgacctcccga

SEQ ID NO: 33523 - RNA, 21 nt, synthetic construct
  source 1..21: mol_type = other RNA
gaaggggctggtggagcctgg

SEQ ID NO: 33524 - RNA, 21 nt, synthetic construct
  source 1..21: mol_type = other RNA
gaatccactgggagggggtac

SEQ ID NO: 33525 - RNA, 21 nt, synthetic construct
  source 1..21: mol_type = other RNA
gacaggtaaggacccttaggg

SEQ ID NO: 33526 - RNA, 21 nt, synthetic construct
  source 1..21: mol_type = other RNA
gacagtgaatccactgggagg

SEQ ID NO: 33527 - RNA, 21 nt, synthetic construct
  source 1..21: mol_type = other RNA
gacccttagggcctgtgagag

SEQ ID NO: 33528 - RNA, 21 nt, synthetic construct
  source 1..21: mol_type = other RNA
gaccggccaggctccaccagc

SEQ ID NO: 33529 - RNA, 21 nt, synthetic construct
  source 1..21: mol_type = other RNA
gacctcccgagcaaacatgac

SEQ ID NO: 33530 - RNA, 21 nt, synthetic construct
  source 1..21: mol_type = other RNA
gacctgcccagcatgcctgaa

SEQ ID NO: 33531 - RNA, 21 nt, synthetic construct
  source 1..21: mol_type = other RNA
gagagtggtgtgagaataacc

SEQ ID NO: 33532 - RNA, 21 nt, synthetic construct
  source 1..21: mol_type = other RNA
gagatgttgggaggccgtgga

SEQ ID NO: 33533 - RNA, 21 nt, synthetic construct
  source 1..21: mol_type = other RNA
gagcaaacatgacaggtaagg

SEQ ID NO: 33534 - RNA, 21 nt, synthetic construct
  source 1..21: mol_type = other RNA
gagcctggccggtctggagat

SEQ ID NO: 33535 - RNA, 21 nt, synthetic construct
  source 1..21: mol_type = other RNA
gagcgaaggggctggtggagc

SEQ ID NO: 33536 - RNA, 21 nt, synthetic construct
  source 1..21: mol_type = other RNA
gaggccgtggacagtgaatcc

SEQ ID NO: 33537 - RNA, 21 nt, synthetic construct
  source 1..21: mol_type = other RNA
gagggggtacttggctggcct

SEQ ID NO: 33538 - RNA, 21 nt, synthetic construct
  source 1..21: mol_type = other RNA
gaggtcagggcaggttcaggc

SEQ ID NO: 33539 - RNA, 21 nt, synthetic construct
  source 1..21: mol_type = other RNA
gaggtgccccaggccagccaa

SEQ ID NO: 33540 - RNA, 21 nt, synthetic construct
  source 1..21: mol_type = other RNA
gagtggtgtgagaataaccag

SEQ ID NO: 33541 - RNA, 21 nt, synthetic construct
  source 1..21: mol_type = other RNA
gatcctgcttctagtacctct

SEQ ID NO: 33542 - RNA, 21 nt, synthetic construct
  source 1..21: mol_type = other RNA
gatggagcgaaggggctggtg

SEQ ID NO: 33543 - RNA, 21 nt, synthetic construct
  source 1..21: mol_type = other RNA
gatgttgggaggccgtggaca

SEQ ID NO: 33544 - RNA, 21 nt, synthetic construct
  source 1..21: mol_type = other RNA
gattcactgtccacggcctcc

SEQ ID NO: 33545 - RNA, 21 nt, synthetic construct
  source 1..21: mol_type = other RNA
gcaaacatgacaggtaaggac

SEQ ID NO: 33546 - RNA, 21 nt, synthetic construct
  source 1..21: mol_type = other RNA
gcacctcacctacattggggg

SEQ ID NO: 33547 - RNA, 21 nt, synthetic construct
  source 1..21: mol_type = other RNA
gcaggtcagtggctgatggag

SEQ ID NO: 33548 - RNA, 21 nt, synthetic construct
  source 1..21: mol_type = other RNA
gcaggttcaggcatgctgggc

SEQ ID NO: 33549 - RNA, 21 nt, synthetic construct
  source 1..21: mol_type = other RNA
gcatgcctgaacctgccctga

SEQ ID NO: 33550 - RNA, 21 nt, synthetic construct
  source 1..21: mol_type = other RNA
gcatgctgggcaggtcagtgg

SEQ ID NO: 33551 - RNA, 21 nt, synthetic construct
  source 1..21: mol_type = other RNA
gccaagtaccccctcccagtg

SEQ ID NO: 33552 - RNA, 21 nt, synthetic construct
  source 1..21: mol_type = other RNA
gccactgacctgcccagcatg

SEQ ID NO: 33553 - RNA, 21 nt, synthetic construct
  source 1..21: mol_type = other RNA
gccagccaagtaccccctccc

SEQ ID NO: 33554 - RNA, 21 nt, synthetic construct
  source 1..21: mol_type = other RNA
gccaggctccaccagcccctt

SEQ ID NO: 33555 - RNA, 21 nt, synthetic construct
  source 1..21: mol_type = other RNA
gcccagcatgcctgaacctgc

SEQ ID NO: 33556 - RNA, 21 nt, synthetic construct
  source 1..21: mol_type = other RNA
gccccaggccagccaagtacc

SEQ ID NO: 33557 - RNA, 21 nt, synthetic construct
  source 1..21: mol_type = other RNA
gccccttcgctccatcagcca

SEQ ID NO: 33558 - RNA, 21 nt, synthetic construct
  source 1..21: mol_type = other RNA
gccctaagggtccttacctgt

SEQ ID NO: 33559 - RNA, 21 nt, synthetic construct
  source 1..21: mol_type = other RNA
gccctgacctcccgagcaaac

SEQ ID NO: 33560 - RNA, 21 nt, synthetic construct
  source 1..21: mol_type = other RNA
gccggtctggagatgttggga

SEQ ID NO: 33561 - RNA, 21 nt, synthetic construct
  source 1..21: mol_type = other RNA
gccgtggacagtgaatccact

SEQ ID NO: 33562 - RNA, 21 nt, synthetic construct
  source 1..21: mol_type = other RNA
gcctcccaacatctccagacc

SEQ ID NO: 33563 - RNA, 21 nt, synthetic construct
  source 1..21: mol_type = other RNA
gcctgaacctgccctgacctc

SEQ ID NO: 33564 - RNA, 21 nt, synthetic construct
  source 1..21: mol_type = other RNA
gcctggccggtctggagatgt

SEQ ID NO: 33565 - RNA, 21 nt, synthetic construct
  source 1..21: mol_type = other RNA
gcctggggcacctcacctaca

SEQ ID NO: 33566 - RNA, 21 nt, synthetic construct
  source 1..21: mol_type = other RNA
gcctgtgagaggtactagaag

SEQ ID NO: 33567 - RNA, 21 nt, synthetic construct
  source 1..21: mol_type = other RNA
gcgaaggggctggtggagcct

SEQ ID NO: 33568 - RNA, 21 nt, synthetic construct
  source 1..21: mol_type = other RNA
gctccaccagccccttcgctc

SEQ ID NO: 33569 - RNA, 21 nt, synthetic construct
  source 1..21: mol_type = other RNA
gctccatcagccactgacctg

SEQ ID NO: 33570 - RNA, 21 nt, synthetic construct
  source 1..21: mol_type = other RNA
gctcgggaggtcagggcaggt

SEQ ID NO: 33571 - RNA, 21 nt, synthetic construct
  source 1..21: mol_type = other RNA
gctgatggagcgaaggggctg

SEQ ID NO: 33572 - RNA, 21 nt, synthetic construct
  source 1..21: mol_type = other RNA
gctggcctggggcacctcacc

SEQ ID NO: 33573 - RNA, 21 nt, synthetic construct
  source 1..21: mol_type = other RNA
gctgggcaggtcagtggctga

SEQ ID NO: 33574 - RNA, 21 nt, synthetic construct
  source 1..21: mol_type = other RNA
gctggtggagcctggccggtc

SEQ ID NO: 33575 - RNA, 21 nt, synthetic construct
  source 1..21: mol_type = other RNA
gcttctagtacctctcacagg

SEQ ID NO: 33576 - RNA, 21 nt, synthetic construct
  source 1..21: mol_type = other RNA
ggacagtgaatccactgggag

SEQ ID NO: 33577 - RNA, 21 nt, synthetic construct
  source 1..21: mol_type = other RNA
ggacccttagggcctgtgaga

SEQ ID NO: 33578 - RNA, 21 nt, synthetic construct
  source 1..21: mol_type = other RNA
ggagagtggtgtgagaataac

SEQ ID NO: 33579 - RNA, 21 nt, synthetic construct
  source 1..21: mol_type = other RNA
ggagatgttgggaggccgtgg

SEQ ID NO: 33580 - RNA, 21 nt, synthetic construct
  source 1..21: mol_type = other RNA
ggagcctggccggtctggaga

SEQ ID NO: 33581 - RNA, 21 nt, synthetic construct
  source 1..21: mol_type = other RNA
ggagcgaaggggctggtggag

SEQ ID NO: 33582 - RNA, 21 nt, synthetic construct
  source 1..21: mol_type = other RNA
ggaggccgtggacagtgaatc

SEQ ID NO: 33583 - RNA, 21 nt, synthetic construct
  source 1..21: mol_type = other RNA
ggagggggtacttggctggcc

SEQ ID NO: 33584 - RNA, 21 nt, synthetic construct
  source 1..21: mol_type = other RNA
ggaggtcagggcaggttcagg

SEQ ID NO: 33585 - RNA, 21 nt, synthetic construct
  source 1..21: mol_type = other RNA
ggattcactgtccacggcctc

SEQ ID NO: 33586 - RNA, 21 nt, synthetic construct
  source 1..21: mol_type = other RNA
ggcacctcacctacattgggg

SEQ ID NO: 33587 - RNA, 21 nt, synthetic construct
  source 1..21: mol_type = other RNA
ggcaggtcagtggctgatgga

SEQ ID NO: 33588 - RNA, 21 nt, synthetic construct
  source 1..21: mol_type = other RNA
ggcaggttcaggcatgctggg

SEQ ID NO: 33589 - RNA, 21 nt, synthetic construct
  source 1..21: mol_type = other RNA
ggcatgctgggcaggtcagtg

SEQ ID NO: 33590 - RNA, 21 nt, synthetic construct
  source 1..21: mol_type = other RNA
ggccagccaagtaccccctcc

SEQ ID NO: 33591 - RNA, 21 nt, synthetic construct
  source 1..21: mol_type = other RNA
ggccaggctccaccagcccct

SEQ ID NO: 33592 - RNA, 21 nt, synthetic construct
  source 1..21: mol_type = other RNA
ggccctaagggtccttacctg

SEQ ID NO: 33593 - RNA, 21 nt, synthetic construct
  source 1..21: mol_type = other RNA
ggccggtctggagatgttggg

SEQ ID NO: 33594 - RNA, 21 nt, synthetic construct
  source 1..21: mol_type = other RNA
ggccgtggacagtgaatccac

SEQ ID NO: 33595 - RNA, 21 nt, synthetic construct
  source 1..21: mol_type = other RNA
ggcctcccaacatctccagac

SEQ ID NO: 33596 - RNA, 21 nt, synthetic construct
  source 1..21: mol_type = other RNA
ggcctggggcacctcacctac

SEQ ID NO: 33597 - RNA, 21 nt, synthetic construct
  source 1..21: mol_type = other RNA
ggcctgtgagaggtactagaa

SEQ ID NO: 33598 - RNA, 21 nt, synthetic construct
  source 1..21: mol_type = other RNA
ggctccaccagccccttcgct

SEQ ID NO: 33599 - RNA, 21 nt, synthetic construct
  source 1..21: mol_type = other RNA
ggctgatggagcgaaggggct

SEQ ID NO: 33600 - RNA, 21 nt, synthetic construct
  source 1..21: mol_type = other RNA
ggctggcctggggcacctcac

SEQ ID NO: 33601 - RNA, 21 nt, synthetic construct
  source 1..21: mol_type = other RNA
ggctggtggagcctggccggt

SEQ ID NO: 33602 - RNA, 21 nt, synthetic construct
  source 1..21: mol_type = other RNA
gggaggccgtggacagtgaat

SEQ ID NO: 33603 - RNA, 21 nt, synthetic construct
  source 1..21: mol_type = other RNA
gggagggggtacttggctggc

SEQ ID NO: 33604 - RNA, 21 nt, synthetic construct
  source 1..21: mol_type = other RNA
gggaggtcagggcaggttcag

SEQ ID NO: 33605 - RNA, 21 nt, synthetic construct
  source 1..21: mol_type = other RNA
gggcacctcacctacattggg

SEQ ID NO: 33606 - RNA, 21 nt, synthetic construct
  source 1..21: mol_type = other RNA
gggcaggtcagtggctgatgg

SEQ ID NO: 33607 - RNA, 21 nt, synthetic construct
  source 1..21: mol_type = other RNA
gggcaggttcaggcatgctgg

SEQ ID NO: 33608 - RNA, 21 nt, synthetic construct
  source 1..21: mol_type = other RNA
gggcctgtgagaggtactaga

SEQ ID NO: 33609 - RNA, 21 nt, synthetic construct
  source 1..21: mol_type = other RNA
ggggcacctcacctacattgg

SEQ ID NO: 33610 - RNA, 21 nt, synthetic construct
  source 1..21: mol_type = other RNA
gggggtacttggctggcctgg

SEQ ID NO: 33611 - RNA, 21 nt, synthetic construct
  source 1..21: mol_type = other RNA
gggggtggagagtggtgtgag

SEQ ID NO: 33612 - RNA, 21 nt, synthetic construct
  source 1..21: mol_type = other RNA
ggggtacttggctggcctggg

SEQ ID NO: 33613 - RNA, 21 nt, synthetic construct
  source 1..21: mol_type = other RNA
ggggtggagagtggtgtgaga

SEQ ID NO: 33614 - RNA, 21 nt, synthetic construct
  source 1..21: mol_type = other RNA
gggtacttggctggcctgggg

SEQ ID NO: 33615 - RNA, 21 nt, synthetic construct
  source 1..21: mol_type = other RNA
gggtccttacctgtcatgttt

SEQ ID NO: 33616 - RNA, 21 nt, synthetic construct
  source 1..21: mol_type = other RNA
gggtggagagtggtgtgagaa

SEQ ID NO: 33617 - RNA, 21 nt, synthetic construct
  source 1..21: mol_type = other RNA
ggtaaggacccttagggcctg

SEQ ID NO: 33618 - RNA, 21 nt, synthetic construct
  source 1..21: mol_type = other RNA
ggtacttggctggcctggggc

SEQ ID NO: 33619 - RNA, 21 nt, synthetic construct
  source 1..21: mol_type = other RNA
ggtcagggcaggttcaggcat

SEQ ID NO: 33620 - RNA, 21 nt, synthetic construct
  source 1..21: mol_type = other RNA
ggtcagtggctgatggagcga

SEQ ID NO: 33621 - RNA, 21 nt, synthetic construct
  source 1..21: mol_type = other RNA
ggtccttacctgtcatgtttg

SEQ ID NO: 33622 - RNA, 21 nt, synthetic construct
  source 1..21: mol_type = other RNA
ggtctggagatgttgggaggc

SEQ ID NO: 33623 - RNA, 21 nt, synthetic construct
  source 1..21: mol_type = other RNA
ggtgaggtgccccaggccagc

SEQ ID NO: 33624 - RNA, 21 nt, synthetic construct
  source 1..21: mol_type = other RNA
ggtgccccaggccagccaagt

SEQ ID NO: 33625 - RNA, 21 nt, synthetic construct
  source 1..21: mol_type = other RNA
ggtggagagtggtgtgagaat

SEQ ID NO: 33626 - RNA, 21 nt, synthetic construct
  source 1..21: mol_type = other RNA
ggtggagcctggccggtctgg

SEQ ID NO: 33627 - RNA, 21 nt, synthetic construct
  source 1..21: mol_type = other RNA
ggttattctcacaccactctc

SEQ ID NO: 33628 - RNA, 21 nt, synthetic construct
  source 1..21: mol_type = other RNA
ggttcaggcatgctgggcagg

SEQ ID NO: 33629 - RNA, 21 nt, synthetic construct
  source 1..21: mol_type = other RNA
gtaaggacccttagggcctgt

SEQ ID NO: 33630 - RNA, 21 nt, synthetic construct
  source 1..21: mol_type = other RNA
gtaccccctcccagtggattc

SEQ ID NO: 33631 - RNA, 21 nt, synthetic construct
  source 1..21: mol_type = other RNA
gtacctctcacaggccctaag

SEQ ID NO: 33632 - RNA, 21 nt, synthetic construct
  source 1..21: mol_type = other RNA
gtacttggctggcctggggca

SEQ ID NO: 33633 - RNA, 21 nt, synthetic construct
  source 1..21: mol_type = other RNA
gtaggtgaggtgccccaggcc

SEQ ID NO: 33634 - RNA, 21 nt, synthetic construct
  source 1..21: mol_type = other RNA
gtcagggcaggttcaggcatg

SEQ ID NO: 33635 - RNA, 21 nt, synthetic construct
  source 1..21: mol_type = other RNA
gtcagtggctgatggagcgaa

SEQ ID NO: 33636 - RNA, 21 nt, synthetic construct
  source 1..21: mol_type = other RNA
gtcatgtttgctcgggaggtc

SEQ ID NO: 33637 - RNA, 21 nt, synthetic construct
  source 1..21: mol_type = other RNA
gtccacggcctcccaacatct

SEQ ID NO: 33638 - RNA, 21 nt, synthetic construct
  source 1..21: mol_type = other RNA
gtccttacctgtcatgtttgc

SEQ ID NO: 33639 - RNA, 21 nt, synthetic construct
  source 1..21: mol_type = other RNA
gtctggagatgttgggaggcc

SEQ ID NO: 33640 - RNA, 21 nt, synthetic construct
  source 1..21: mol_type = other RNA
gtgaatccactgggagggggt

SEQ ID NO: 33641 - RNA, 21 nt, synthetic construct
  source 1..21: mol_type = other RNA
gtgaggtgccccaggccagcc

SEQ ID NO: 33642 - RNA, 21 nt, synthetic construct
  source 1..21: mol_type = other RNA
gtgccccaggccagccaagta

SEQ ID NO: 33643 - RNA, 21 nt, synthetic construct
  source 1..21: mol_type = other RNA
gtggacagtgaatccactggg

SEQ ID NO: 33644 - RNA, 21 nt, synthetic construct
  source 1..21: mol_type = other RNA
gtggagagtggtgtgagaata

SEQ ID NO: 33645 - RNA, 21 nt, synthetic construct
  source 1..21: mol_type = other RNA
gtggagcctggccggtctgga

SEQ ID NO: 33646 - RNA, 21 nt, synthetic construct
  source 1..21: mol_type = other RNA
gtggattcactgtccacggcc

SEQ ID NO: 33647 - RNA, 21 nt, synthetic construct
  source 1..21: mol_type = other RNA
gtggctgatggagcgaagggg

SEQ ID NO: 33648 - RNA, 21 nt, synthetic construct
  source 1..21: mol_type = other RNA
gttattctcacaccactctcc

SEQ ID NO: 33649 - RNA, 21 nt, synthetic construct
  source 1..21: mol_type = other RNA
gttcaggcatgctgggcaggt

SEQ ID NO: 33650 - RNA, 21 nt, synthetic construct
  source 1..21: mol_type = other RNA
gttgggaggccgtggacagtg

SEQ ID NO: 33651 - RNA, 21 nt, synthetic construct
  source 1..21: mol_type = other RNA
gtttgctcgggaggtcagggc

SEQ ID NO: 33652 - RNA, 21 nt, synthetic construct
  source 1..21: mol_type = other RNA
taaggacccttagggcctgtg

SEQ ID NO: 33653 - RNA, 21 nt, synthetic construct
  source 1..21: mol_type = other RNA
taagggtccttacctgtcatg

SEQ ID NO: 33654 - RNA, 21 nt, synthetic construct
  source 1..21: mol_type = other RNA
tacattgggggtggagagtgg

SEQ ID NO: 33655 - RNA, 21 nt, synthetic construct
  source 1..21: mol_type = other RNA
taccccctcccagtggattca

SEQ ID NO: 33656 - RNA, 21 nt, synthetic construct
  source 1..21: mol_type = other RNA
tacctctcacaggccctaagg

SEQ ID NO: 33657 - RNA, 21 nt, synthetic construct
  source 1..21: mol_type = other RNA
tacctggttattctcacacca

SEQ ID NO: 33658 - RNA, 21 nt, synthetic construct
  source 1..21: mol_type = other RNA
tacctgtcatgtttgctcggg

SEQ ID NO: 33659 - RNA, 21 nt, synthetic construct
  source 1..21: mol_type = other RNA
tacttggctggcctggggcac

SEQ ID NO: 33660 - RNA, 21 nt, synthetic construct
  source 1..21: mol_type = other RNA
tagggcctgtgagaggtacta

SEQ ID NO: 33661 - RNA, 21 nt, synthetic construct
  source 1..21: mol_type = other RNA
taggtgaggtgccccaggcca

SEQ ID NO: 33662 - RNA, 21 nt, synthetic construct
  source 1..21: mol_type = other RNA
tagtacctctcacaggcccta

SEQ ID NO: 33663 - RNA, 21 nt, synthetic construct
  source 1..21: mol_type = other RNA
tattctcacaccactctccac

SEQ ID NO: 33664 - RNA, 21 nt, synthetic construct
  source 1..21: mol_type = other RNA
tcaatacctggttattctcac

SEQ ID NO: 33665 - RNA, 21 nt, synthetic construct
  source 1..21: mol_type = other RNA
tcacaccactctccaccccca

SEQ ID NO: 33666 - RNA, 21 nt, synthetic construct
  source 1..21: mol_type = other RNA
tcacaggccctaagggtcctt

SEQ ID NO: 33667 - RNA, 21 nt, synthetic construct
  source 1..21: mol_type = other RNA
tcacctacattgggggtggag

SEQ ID NO: 33668 - RNA, 21 nt, synthetic construct
  source 1..21: mol_type = other RNA
tcactgtccacggcctcccaa

SEQ ID NO: 33669 - RNA, 21 nt, synthetic construct
  source 1..21: mol_type = other RNA
tcagccactgacctgcccagc

SEQ ID NO: 33670 - RNA, 21 nt, synthetic construct
  source 1..21: mol_type = other RNA
tcaggcatgctgggcaggtca

SEQ ID NO: 33671 - RNA, 21 nt, synthetic construct
  source 1..21: mol_type = other RNA
tcagggcaggttcaggcatgc

SEQ ID NO: 33672 - RNA, 21 nt, synthetic construct
  source 1..21: mol_type = other RNA
tcagtggctgatggagcgaag

SEQ ID NO: 33673 - RNA, 21 nt, synthetic construct
  source 1..21: mol_type = other RNA
tcatgtttgctcgggaggtca

SEQ ID NO: 33674 - RNA, 21 nt, synthetic construct
  source 1..21: mol_type = other RNA
tccaccagccccttcgctcca

SEQ ID NO: 33675 - RNA, 21 nt, synthetic construct
  source 1..21: mol_type = other RNA
tccacccccaatgtaggtgag

SEQ ID NO: 33676 - RNA, 21 nt, synthetic construct
  source 1..21: mol_type = other RNA
tccacggcctcccaacatctc

SEQ ID NO: 33677 - RNA, 21 nt, synthetic construct
  source 1..21: mol_type = other RNA
tccactgggagggggtacttg

SEQ ID NO: 33678 - RNA, 21 nt, synthetic construct
  source 1..21: mol_type = other RNA
tccagaccggccaggctccac

SEQ ID NO: 33679 - RNA, 21 nt, synthetic construct
  source 1..21: mol_type = other RNA
tccatcagccactgacctgcc

SEQ ID NO: 33680 - RNA, 21 nt, synthetic construct
  source 1..21: mol_type = other RNA
tcccaacatctccagaccggc

SEQ ID NO: 33681 - RNA, 21 nt, synthetic construct
  source 1..21: mol_type = other RNA
tcccagtggattcactgtcca

SEQ ID NO: 33682 - RNA, 21 nt, synthetic construct
  source 1..21: mol_type = other RNA
tcccgagcaaacatgacaggt

SEQ ID NO: 33683 - RNA, 21 nt, synthetic construct
  source 1..21: mol_type = other RNA
tcctgcttctagtacctctca

SEQ ID NO: 33684 - RNA, 21 nt, synthetic construct
  source 1..21: mol_type = other RNA
tccttacctgtcatgtttgct

SEQ ID NO: 33685 - RNA, 21 nt, synthetic construct
  source 1..21: mol_type = other RNA
tcgatcctgcttctagtacct

SEQ ID NO: 33686 - RNA, 21 nt, synthetic construct
  source 1..21: mol_type = other RNA
tcgctccatcagccactgacc

SEQ ID NO: 33687 - RNA, 21 nt, synthetic construct
  source 1..21: mol_type = other RNA
tcgggaggtcagggcaggttc

SEQ ID NO: 33688 - RNA, 21 nt, synthetic construct
  source 1..21: mol_type = other RNA
tctagtacctctcacaggccc

SEQ ID NO: 33689 - RNA, 21 nt, synthetic construct
  source 1..21: mol_type = other RNA
tctcacaccactctccacccc

SEQ ID NO: 33690 - RNA, 21 nt, synthetic construct
  source 1..21: mol_type = other RNA
tctcacaggccctaagggtcc

SEQ ID NO: 33691 - RNA, 21 nt, synthetic construct
  source 1..21: mol_type = other RNA
tctccacccccaatgtaggtg

SEQ ID NO: 33692 - RNA, 21 nt, synthetic construct
  source 1..21: mol_type = other RNA
tctccagaccggccaggctcc

SEQ ID NO: 33693 - RNA, 21 nt, synthetic construct
  source 1..21: mol_type = other RNA
tctggagatgttgggaggccg

SEQ ID NO: 33694 - RNA, 21 nt, synthetic construct
  source 1..21: mol_type = other RNA
tgaacctgccctgacctcccg

SEQ ID NO: 33695 - RNA, 21 nt, synthetic construct
  source 1..21: mol_type = other RNA
tgaatccactgggagggggta

SEQ ID NO: 33696 - RNA, 21 nt, synthetic construct
  source 1..21: mol_type = other RNA
tgacaggtaaggacccttagg

SEQ ID NO: 33697 - RNA, 21 nt, synthetic construct
  source 1..21: mol_type = other RNA
tgacctcccgagcaaacatga

SEQ ID NO: 33698 - RNA, 21 nt, synthetic construct
  source 1..21: mol_type = other RNA
tgacctgcccagcatgcctga

SEQ ID NO: 33699 - RNA, 21 nt, synthetic construct
  source 1..21: mol_type = other RNA
tgaggtgccccaggccagcca

SEQ ID NO: 33700 - RNA, 21 nt, synthetic construct
  source 1..21: mol_type = other RNA
tgatggagcgaaggggctggt

SEQ ID NO: 33701 - RNA, 21 nt, synthetic construct
  source 1..21: mol_type = other RNA
tgcccagcatgcctgaacctg

SEQ ID NO: 33702 - RNA, 21 nt, synthetic construct
  source 1..21: mol_type = other RNA
tgccccaggccagccaagtac

SEQ ID NO: 33703 - RNA, 21 nt, synthetic construct
  source 1..21: mol_type = other RNA
tgccctgacctcccgagcaaa

SEQ ID NO: 33704 - RNA, 21 nt, synthetic construct
  source 1..21: mol_type = other RNA
tgcctgaacctgccctgacct

SEQ ID NO: 33705 - RNA, 21 nt, synthetic construct
  source 1..21: mol_type = other RNA
tgctcgggaggtcagggcagg

SEQ ID NO: 33706 - RNA, 21 nt, synthetic construct
  source 1..21: mol_type = other RNA
tgctgggcaggtcagtggctg

SEQ ID NO: 33707 - RNA, 21 nt, synthetic construct
  source 1..21: mol_type = other RNA
tgcttctagtacctctcacag

SEQ ID NO: 33708 - RNA, 21 nt, synthetic construct
  source 1..21: mol_type = other RNA
tggacagtgaatccactggga

SEQ ID NO: 33709 - RNA, 21 nt, synthetic construct
  source 1..21: mol_type = other RNA
tggagagtggtgtgagaataa

SEQ ID NO: 33710 - RNA, 21 nt, synthetic construct
  source 1..21: mol_type = other RNA
tggagatgttgggaggccgtg

SEQ ID NO: 33711 - RNA, 21 nt, synthetic construct
  source 1..21: mol_type = other RNA
tggagcctggccggtctggag

SEQ ID NO: 33712 - RNA, 21 nt, synthetic construct
  source 1..21: mol_type = other RNA
tggagcgaaggggctggtgga

SEQ ID NO: 33713 - RNA, 21 nt, synthetic construct
  source 1..21: mol_type = other RNA
tggattcactgtccacggcct

SEQ ID NO: 33714 - RNA, 21 nt, synthetic construct
  source 1..21: mol_type = other RNA
tggccggtctggagatgttgg

SEQ ID NO: 33715 - RNA, 21 nt, synthetic construct
  source 1..21: mol_type = other RNA
tggcctggggcacctcaccta

SEQ ID NO: 33716 - RNA, 21 nt, synthetic construct
  source 1..21: mol_type = other RNA
tggctgatggagcgaaggggc

SEQ ID NO: 33717 - RNA, 21 nt, synthetic construct
  source 1..21: mol_type = other RNA
tggctggcctggggcacctca

SEQ ID NO: 33718 - RNA, 21 nt, synthetic construct
  source 1..21: mol_type = other RNA
tgggaggccgtggacagtgaa

SEQ ID NO: 33719 - RNA, 21 nt, synthetic construct
  source 1..21: mol_type = other RNA
tgggagggggtacttggctgg

SEQ ID NO: 33720 - RNA, 21 nt, synthetic construct
  source 1..21: mol_type = other RNA
tgggcaggtcagtggctgatg

SEQ ID NO: 33721 - RNA, 21 nt, synthetic construct
  source 1..21: mol_type = other RNA
tggggcacctcacctacattg

SEQ ID NO: 33722 - RNA, 21 nt, synthetic construct
  source 1..21: mol_type = other RNA
tgggggtggagagtggtgtga

SEQ ID NO: 33723 - RNA, 21 nt, synthetic construct
  source 1..21: mol_type = other RNA
tggtggagcctggccggtctg

SEQ ID NO: 33724 - RNA, 21 nt, synthetic construct
  source 1..21: mol_type = other RNA
tggttattctcacaccactct

SEQ ID NO: 33725 - RNA, 21 nt, synthetic construct
  source 1..21: mol_type = other RNA
tgtaggtgaggtgccccaggc

SEQ ID NO: 33726 - RNA, 21 nt, synthetic construct
  source 1..21: mol_type = other RNA
tgtcatgtttgctcgggaggt

SEQ ID NO: 33727 - RNA, 21 nt, synthetic construct
  source 1..21: mol_type = other RNA
tgtccacggcctcccaacatc

SEQ ID NO: 33728 - RNA, 21 nt, synthetic construct
  source 1..21: mol_type = other RNA
tgttgggaggccgtggacagt

SEQ ID NO: 33729 - RNA, 21 nt, synthetic construct
  source 1..21: mol_type = other RNA
tgtttgctcgggaggtcaggg

SEQ ID NO: 33730 - RNA, 21 nt, synthetic construct
  source 1..21: mol_type = other RNA
ttacctgtcatgtttgctcgg

SEQ ID NO: 33731 - RNA, 21 nt, synthetic construct
  source 1..21: mol_type = other RNA
ttagggcctgtgagaggtact

SEQ ID NO: 33732 - RNA, 21 nt, synthetic construct
  source 1..21: mol_type = other RNA
ttattctcacaccactctcca

SEQ ID NO: 33733 - RNA, 21 nt, synthetic construct
  source 1..21: mol_type = other RNA
ttcactgtccacggcctccca

SEQ ID NO: 33734 - RNA, 21 nt, synthetic construct
  source 1..21: mol_type = other RNA
ttcaggcatgctgggcaggtc

SEQ ID NO: 33735 - RNA, 21 nt, synthetic construct
  source 1..21: mol_type = other RNA
ttcgctccatcagccactgac

SEQ ID NO: 33736 - RNA, 21 nt, synthetic construct
  source 1..21: mol_type = other RNA
ttctagtacctctcacaggcc

SEQ ID NO: 33737 - RNA, 21 nt, synthetic construct
  source 1..21: mol_type = other RNA
ttctcacaccactctccaccc

SEQ ID NO: 33738 - RNA, 21 nt, synthetic construct
  source 1..21: mol_type = other RNA
ttgctcgggaggtcagggcag

SEQ ID NO: 33739 - RNA, 21 nt, synthetic construct
  source 1..21: mol_type = other RNA
ttggctggcctggggcacctc

SEQ ID NO: 33740 - RNA, 21 nt, synthetic construct
  source 1..21: mol_type = other RNA
ttgggaggccgtggacagtga

SEQ ID NO: 33741 - RNA, 21 nt, synthetic construct
  source 1..21: mol_type = other RNA
ttgggggtggagagtggtgtg

SEQ ID NO: 33742 - RNA, 21 nt, synthetic construct
  source 1..21: mol_type = other RNA
tttgctcgggaggtcagggca

SEQ ID NO: 33743 - RNA, 22 nt, synthetic construct
  source 1..22: mol_type = other RNA
aaacatgacaggtaaggaccct

SEQ ID NO: 33744 - RNA, 22 nt, synthetic construct
  source 1..22: mol_type = other RNA
aacatctccagaccggccaggc

SEQ ID NO: 33745 - RNA, 22 nt, synthetic construct
  source 1..22: mol_type = other RNA
aacatgacaggtaaggaccctt

SEQ ID NO: 33746 - RNA, 22 nt, synthetic construct
  source 1..22: mol_type = other RNA
aacctgccctgacctcccgagc

SEQ ID NO: 33747 - RNA, 22 nt, synthetic construct
  source 1..22: mol_type = other RNA
aaggacccttagggcctgtgag

SEQ ID NO: 33748 - RNA, 22 nt, synthetic construct
  source 1..22: mol_type = other RNA
aaggggctggtggagcctggcc

SEQ ID NO: 33749 - RNA, 22 nt, synthetic construct
  source 1..22: mol_type = other RNA
aagggtccttacctgtcatgtt

SEQ ID NO: 33750 - RNA, 22 nt, synthetic construct
  source 1..22: mol_type = other RNA
aagtaccccctcccagtggatt

SEQ ID NO: 33751 - RNA, 22 nt, synthetic construct
  source 1..22: mol_type = other RNA
aatacctggttattctcacacc

SEQ ID NO: 33752 - RNA, 22 nt, synthetic construct
  source 1..22: mol_type = other RNA
aatcaatacctggttattctca

SEQ ID NO: 33753 - RNA, 22 nt, synthetic construct
  source 1..22: mol_type = other RNA
aatccactgggagggggtactt

SEQ ID NO: 33754 - RNA, 22 nt, synthetic construct
  source 1..22: mol_type = other RNA
aatgtaggtgaggtgccccagg

SEQ ID NO: 33755 - RNA, 22 nt, synthetic construct
  source 1..22: mol_type = other RNA
acaccactctccacccccaatg

SEQ ID NO: 33756 - RNA, 22 nt, synthetic construct
  source 1..22: mol_type = other RNA
acaggccctaagggtccttacc

SEQ ID NO: 33757 - RNA, 22 nt, synthetic construct
  source 1..22: mol_type = other RNA
acaggtaaggacccttagggcc

SEQ ID NO: 33758 - RNA, 22 nt, synthetic construct
  source 1..22: mol_type = other RNA
acagtgaatccactgggagggg

SEQ ID NO: 33759 - RNA, 22 nt, synthetic construct
  source 1..22: mol_type = other RNA
acatctccagaccggccaggct

SEQ ID NO: 33760 - RNA, 22 nt, synthetic construct
  source 1..22: mol_type = other RNA
acatgacaggtaaggaccctta

SEQ ID NO: 33761 - RNA, 22 nt, synthetic construct
  source 1..22: mol_type = other RNA
acattgggggtggagagtggtg

SEQ ID NO: 33762 - RNA, 22 nt, synthetic construct
  source 1..22: mol_type = other RNA
accactctccacccccaatgta

SEQ ID NO: 33763 - RNA, 22 nt, synthetic construct
  source 1..22: mol_type = other RNA
accagccccttcgctccatcag

SEQ ID NO: 33764 - RNA, 22 nt, synthetic construct
  source 1..22: mol_type = other RNA
acccccaatgtaggtgaggtgc

SEQ ID NO: 33765 - RNA, 22 nt, synthetic construct
  source 1..22: mol_type = other RNA
accccctcccagtggattcact

SEQ ID NO: 33766 - RNA, 22 nt, synthetic construct
  source 1..22: mol_type = other RNA
acccttagggcctgtgagaggt

SEQ ID NO: 33767 - RNA, 22 nt, synthetic construct
  source 1..22: mol_type = other RNA
accggccaggctccaccagccc

SEQ ID NO: 33768 - RNA, 22 nt, synthetic construct
  source 1..22: mol_type = other RNA
acctacattgggggtggagagt

SEQ ID NO: 33769 - RNA, 22 nt, synthetic construct
  source 1..22: mol_type = other RNA
acctcacctacattgggggtgg

SEQ ID NO: 33770 - RNA, 22 nt, synthetic construct
  source 1..22: mol_type = other RNA
acctcccgagcaaacatgacag

SEQ ID NO: 33771 - RNA, 22 nt, synthetic construct
  source 1..22: mol_type = other RNA
acctctcacaggccctaagggt

SEQ ID NO: 33772 - RNA, 22 nt, synthetic construct
  source 1..22: mol_type = other RNA
acctgcccagcatgcctgaacc

SEQ ID NO: 33773 - RNA, 22 nt, synthetic construct
  source 1..22: mol_type = other RNA
acctgccctgacctcccgagca

SEQ ID NO: 33774 - RNA, 22 nt, synthetic construct
  source 1..22: mol_type = other RNA
acctggttattctcacaccact

SEQ ID NO: 33775 - RNA, 22 nt, synthetic construct
  source 1..22: mol_type = other RNA
acctgtcatgtttgctcgggag

SEQ ID NO: 33776 - RNA, 22 nt, synthetic construct
  source 1..22: mol_type = other RNA
acggcctcccaacatctccaga

SEQ ID NO: 33777 - RNA, 22 nt, synthetic construct
  source 1..22: mol_type = other RNA
actctccacccccaatgtaggt

SEQ ID NO: 33778 - RNA, 22 nt, synthetic construct
  source 1..22: mol_type = other RNA
actgacctgcccagcatgcctg

SEQ ID NO: 33779 - RNA, 22 nt, synthetic construct
  source 1..22: mol_type = other RNA
actgggagggggtacttggctg

SEQ ID NO: 33780 - RNA, 22 nt, synthetic construct
  source 1..22: mol_type = other RNA
actgtccacggcctcccaacat

SEQ ID NO: 33781 - RNA, 22 nt, synthetic construct
  source 1..22: mol_type = other RNA
acttggctggcctggggcacct

SEQ ID NO: 33782 - RNA, 22 nt, synthetic construct
  source 1..22: mol_type = other RNA
agaccggccaggctccaccagc

SEQ ID NO: 33783 - RNA, 22 nt, synthetic construct
  source 1..22: mol_type = other RNA
agagtggtgtgagaataaccag

SEQ ID NO: 33784 - RNA, 22 nt, synthetic construct
  source 1..22: mol_type = other RNA
agatgttgggaggccgtggaca

SEQ ID NO: 33785 - RNA, 22 nt, synthetic construct
  source 1..22: mol_type = other RNA
agcaaacatgacaggtaaggac

SEQ ID NO: 33786 - RNA, 22 nt, synthetic construct
  source 1..22: mol_type = other RNA
agcatgcctgaacctgccctga

SEQ ID NO: 33787 - RNA, 22 nt, synthetic construct
  source 1..22: mol_type = other RNA
agccaagtaccccctcccagtg

SEQ ID NO: 33788 - RNA, 22 nt, synthetic construct
  source 1..22: mol_type = other RNA
agccactgacctgcccagcatg

SEQ ID NO: 33789 - RNA, 22 nt, synthetic construct
  source 1..22: mol_type = other RNA
agccccttcgctccatcagcca

SEQ ID NO: 33790 - RNA, 22 nt, synthetic construct
  source 1..22: mol_type = other RNA
agcctggccggtctggagatgt

SEQ ID NO: 33791 - RNA, 22 nt, synthetic construct
  source 1..22: mol_type = other RNA
agcgaaggggctggtggagcct

SEQ ID NO: 33792 - RNA, 22 nt, synthetic construct
  source 1..22: mol_type = other RNA
aggacccttagggcctgtgaga

SEQ ID NO: 33793 - RNA, 22 nt, synthetic construct
  source 1..22: mol_type = other RNA
aggcatgctgggcaggtcagtg

SEQ ID NO: 33794 - RNA, 22 nt, synthetic construct
  source 1..22: mol_type = other RNA
aggccagccaagtaccccctcc

SEQ ID NO: 33795 - RNA, 22 nt, synthetic construct
  source 1..22: mol_type = other RNA
aggccctaagggtccttacctg

SEQ ID NO: 33796 - RNA, 22 nt, synthetic construct
  source 1..22: mol_type = other RNA
aggccgtggacagtgaatccac

SEQ ID NO: 33797 - RNA, 22 nt, synthetic construct
  source 1..22: mol_type = other RNA
aggctccaccagccccttcgct

SEQ ID NO: 33798 - RNA, 22 nt, synthetic construct
  source 1..22: mol_type = other RNA
agggcaggttcaggcatgctgg

SEQ ID NO: 33799 - RNA, 22 nt, synthetic construct
  source 1..22: mol_type = other RNA
agggcctgtgagaggtactaga

SEQ ID NO: 33800 - RNA, 22 nt, synthetic construct
  source 1..22: mol_type = other RNA
aggggctggtggagcctggccg

SEQ ID NO: 33801 - RNA, 22 nt, synthetic construct
  source 1..22: mol_type = other RNA
agggggtacttggctggcctgg

SEQ ID NO: 33802 - RNA, 22 nt, synthetic construct
  source 1..22: mol_type = other RNA
agggtccttacctgtcatgttt

SEQ ID NO: 33803 - RNA, 22 nt, synthetic construct
  source 1..22: mol_type = other RNA
aggtaaggacccttagggcctg

SEQ ID NO: 33804 - RNA, 22 nt, synthetic construct
  source 1..22: mol_type = other RNA
aggtcagggcaggttcaggcat

SEQ ID NO: 33805 - RNA, 22 nt, synthetic construct
  source 1..22: mol_type = other RNA
aggtcagtggctgatggagcga

SEQ ID NO: 33806 - RNA, 22 nt, synthetic construct
  source 1..22: mol_type = other RNA
aggtgaggtgccccaggccagc

SEQ ID NO: 33807 - RNA, 22 nt, synthetic construct
  source 1..22: mol_type = other RNA
aggtgccccaggccagccaagt

SEQ ID NO: 33808 - RNA, 22 nt, synthetic construct
  source 1..22: mol_type = other RNA
aggttcaggcatgctgggcagg

SEQ ID NO: 33809 - RNA, 22 nt, synthetic construct
  source 1..22: mol_type = other RNA
agtaccccctcccagtggattc

SEQ ID NO: 33810 - RNA, 22 nt, synthetic construct
  source 1..22: mol_type = other RNA
agtacctctcacaggccctaag

SEQ ID NO: 33811 - RNA, 22 nt, synthetic construct
  source 1..22: mol_type = other RNA
agtgaatccactgggagggggt

SEQ ID NO: 33812 - RNA, 22 nt, synthetic construct
  source 1..22: mol_type = other RNA
agtggattcactgtccacggcc

SEQ ID NO: 33813 - RNA, 22 nt, synthetic construct
  source 1..22: mol_type = other RNA
agtggctgatggagcgaagggg

SEQ ID NO: 33814 - RNA, 22 nt, synthetic construct
  source 1..22: mol_type = other RNA
atacctggttattctcacacca

SEQ ID NO: 33815 - RNA, 22 nt, synthetic construct
  source 1..22: mol_type = other RNA
atcaatacctggttattctcac

SEQ ID NO: 33816 - RNA, 22 nt, synthetic construct
  source 1..22: mol_type = other RNA
atcagccactgacctgcccagc

SEQ ID NO: 33817 - RNA, 22 nt, synthetic construct
  source 1..22: mol_type = other RNA
atccactgggagggggtacttg

SEQ ID NO: 33818 - RNA, 22 nt, synthetic construct
  source 1..22: mol_type = other RNA
atcctgcttctagtacctctca

SEQ ID NO: 33819 - RNA, 22 nt, synthetic construct
  source 1..22: mol_type = other RNA
atctccagaccggccaggctcc

SEQ ID NO: 33820 - RNA, 22 nt, synthetic construct
  source 1..22: mol_type = other RNA
atgacaggtaaggacccttagg

SEQ ID NO: 33821 - RNA, 22 nt, synthetic construct
  source 1..22: mol_type = other RNA
atgcctgaacctgccctgacct

SEQ ID NO: 33822 - RNA, 22 nt, synthetic construct
  source 1..22: mol_type = other RNA
atgctgggcaggtcagtggctg

SEQ ID NO: 33823 - RNA, 22 nt, synthetic construct
  source 1..22: mol_type = other RNA
atggagcgaaggggctggtgga

SEQ ID NO: 33824 - RNA, 22 nt, synthetic construct
  source 1..22: mol_type = other RNA
atgtaggtgaggtgccccaggc

SEQ ID NO: 33825 - RNA, 22 nt, synthetic construct
  source 1..22: mol_type = other RNA
atgttgggaggccgtggacagt

SEQ ID NO: 33826 - RNA, 22 nt, synthetic construct
  source 1..22: mol_type = other RNA
atgtttgctcgggaggtcaggg

SEQ ID NO: 33827 - RNA, 22 nt, synthetic construct
  source 1..22: mol_type = other RNA
attcactgtccacggcctccca

SEQ ID NO: 33828 - RNA, 22 nt, synthetic construct
  source 1..22: mol_type = other RNA
attctcacaccactctccaccc

SEQ ID NO: 33829 - RNA, 22 nt, synthetic construct
  source 1..22: mol_type = other RNA
attgggggtggagagtggtgtg

SEQ ID NO: 33830 - RNA, 22 nt, synthetic construct
  source 1..22: mol_type = other RNA
caaacatgacaggtaaggaccc

SEQ ID NO: 33831 - RNA, 22 nt, synthetic construct
  source 1..22: mol_type = other RNA
caacatctccagaccggccagg

SEQ ID NO: 33832 - RNA, 22 nt, synthetic construct
  source 1..22: mol_type = other RNA
caagtaccccctcccagtggat

SEQ ID NO: 33833 - RNA, 22 nt, synthetic construct
  source 1..22: mol_type = other RNA
caatacctggttattctcacac

SEQ ID NO: 33834 - RNA, 22 nt, synthetic construct
  source 1..22: mol_type = other RNA
caatgtaggtgaggtgccccag

SEQ ID NO: 33835 - RNA, 22 nt, synthetic construct
  source 1..22: mol_type = other RNA
cacaccactctccacccccaat

SEQ ID NO: 33836 - RNA, 22 nt, synthetic construct
  source 1..22: mol_type = other RNA
cacaggccctaagggtccttac

SEQ ID NO: 33837 - RNA, 22 nt, synthetic construct
  source 1..22: mol_type = other RNA
caccactctccacccccaatgt

SEQ ID NO: 33838 - RNA, 22 nt, synthetic construct
  source 1..22: mol_type = other RNA
caccagccccttcgctccatca

SEQ ID NO: 33839 - RNA, 22 nt, synthetic construct
  source 1..22: mol_type = other RNA
cacccccaatgtaggtgaggtg

SEQ ID NO: 33840 - RNA, 22 nt, synthetic construct
  source 1..22: mol_type = other RNA
cacctacattgggggtggagag

SEQ ID NO: 33841 - RNA, 22 nt, synthetic construct
  source 1..22: mol_type = other RNA
cacctcacctacattgggggtg

SEQ ID NO: 33842 - RNA, 22 nt, synthetic construct
  source 1..22: mol_type = other RNA
cacggcctcccaacatctccag

SEQ ID NO: 33843 - RNA, 22 nt, synthetic construct
  source 1..22: mol_type = other RNA
cactctccacccccaatgtagg

SEQ ID NO: 33844 - RNA, 22 nt, synthetic construct
  source 1..22: mol_type = other RNA
cactgacctgcccagcatgcct

SEQ ID NO: 33845 - RNA, 22 nt, synthetic construct
  source 1..22: mol_type = other RNA
cactgggagggggtacttggct

SEQ ID NO: 33846 - RNA, 22 nt, synthetic construct
  source 1..22: mol_type = other RNA
cactgtccacggcctcccaaca

SEQ ID NO: 33847 - RNA, 22 nt, synthetic construct
  source 1..22: mol_type = other RNA
cagaccggccaggctccaccag

SEQ ID NO: 33848 - RNA, 22 nt, synthetic construct
  source 1..22: mol_type = other RNA
cagcatgcctgaacctgccctg

SEQ ID NO: 33849 - RNA, 22 nt, synthetic construct
  source 1..22: mol_type = other RNA
cagccaagtaccccctcccagt

SEQ ID NO: 33850 - RNA, 22 nt, synthetic construct
  source 1..22: mol_type = other RNA
cagccactgacctgcccagcat

SEQ ID NO: 33851 - RNA, 22 nt, synthetic construct
  source 1..22: mol_type = other RNA
cagccccttcgctccatcagcc

SEQ ID NO: 33852 - RNA, 22 nt, synthetic construct
  source 1..22: mol_type = other RNA
caggcatgctgggcaggtcagt

SEQ ID NO: 33853 - RNA, 22 nt, synthetic construct
  source 1..22: mol_type = other RNA
caggccagccaagtaccccctc

SEQ ID NO: 33854 - RNA, 22 nt, synthetic construct
  source 1..22: mol_type = other RNA
caggccctaagggtccttacct

SEQ ID NO: 33855 - RNA, 22 nt, synthetic construct
  source 1..22: mol_type = other RNA
caggctccaccagccccttcgc

SEQ ID NO: 33856 - RNA, 22 nt, synthetic construct
  source 1..22: mol_type = other RNA
cagggcaggttcaggcatgctg

SEQ ID NO: 33857 - RNA, 22 nt, synthetic construct
  source 1..22: mol_type = other RNA
caggtaaggacccttagggcct

SEQ ID NO: 33858 - RNA, 22 nt, synthetic construct
  source 1..22: mol_type = other RNA
caggtcagtggctgatggagcg

SEQ ID NO: 33859 - RNA, 22 nt, synthetic construct
  source 1..22: mol_type = other RNA
caggttcaggcatgctgggcag

SEQ ID NO: 33860 - RNA, 22 nt, synthetic construct
  source 1..22: mol_type = other RNA
cagtgaatccactgggaggggg

SEQ ID NO: 33861 - RNA, 22 nt, synthetic construct
  source 1..22: mol_type = other RNA
cagtggattcactgtccacggc

SEQ ID NO: 33862 - RNA, 22 nt, synthetic construct
  source 1..22: mol_type = other RNA
cagtggctgatggagcgaaggg

SEQ ID NO: 33863 - RNA, 22 nt, synthetic construct
  source 1..22: mol_type = other RNA
catcagccactgacctgcccag

SEQ ID NO: 33864 - RNA, 22 nt, synthetic construct
  source 1..22: mol_type = other RNA
catctccagaccggccaggctc

SEQ ID NO: 33865 - RNA, 22 nt, synthetic construct
  source 1..22: mol_type = other RNA
catgacaggtaaggacccttag

SEQ ID NO: 33866 - RNA, 22 nt, synthetic construct
  source 1..22: mol_type = other RNA
catgcctgaacctgccctgacc

SEQ ID NO: 33867 - RNA, 22 nt, synthetic construct
  source 1..22: mol_type = other RNA
catgctgggcaggtcagtggct

SEQ ID NO: 33868 - RNA, 22 nt, synthetic construct
  source 1..22: mol_type = other RNA
catgtttgctcgggaggtcagg

SEQ ID NO: 33869 - RNA, 22 nt, synthetic construct
  source 1..22: mol_type = other RNA
cattgggggtggagagtggtgt

SEQ ID NO: 33870 - RNA, 22 nt, synthetic construct
  source 1..22: mol_type = other RNA
ccaacatctccagaccggccag

SEQ ID NO: 33871 - RNA, 22 nt, synthetic construct
  source 1..22: mol_type = other RNA
ccaagtaccccctcccagtgga

SEQ ID NO: 33872 - RNA, 22 nt, synthetic construct
  source 1..22: mol_type = other RNA
ccaatgtaggtgaggtgcccca

SEQ ID NO: 33873 - RNA, 22 nt, synthetic construct
  source 1..22: mol_type = other RNA
ccaccagccccttcgctccatc

SEQ ID NO: 33874 - RNA, 22 nt, synthetic construct
  source 1..22: mol_type = other RNA
ccacccccaatgtaggtgaggt

SEQ ID NO: 33875 - RNA, 22 nt, synthetic construct
  source 1..22: mol_type = other RNA
ccacggcctcccaacatctcca

SEQ ID NO: 33876 - RNA, 22 nt, synthetic construct
  source 1..22: mol_type = other RNA
ccactctccacccccaatgtag

SEQ ID NO: 33877 - RNA, 22 nt, synthetic construct
  source 1..22: mol_type = other RNA
ccactgacctgcccagcatgcc

SEQ ID NO: 33878 - RNA, 22 nt, synthetic construct
  source 1..22: mol_type = other RNA
ccactgggagggggtacttggc

SEQ ID NO: 33879 - RNA, 22 nt, synthetic construct
  source 1..22: mol_type = other RNA
ccagaccggccaggctccacca

SEQ ID NO: 33880 - RNA, 22 nt, synthetic construct
  source 1..22: mol_type = other RNA
ccagcatgcctgaacctgccct

SEQ ID NO: 33881 - RNA, 22 nt, synthetic construct
  source 1..22: mol_type = other RNA
ccagccaagtaccccctcccag

SEQ ID NO: 33882 - RNA, 22 nt, synthetic construct
  source 1..22: mol_type = other RNA
ccagccccttcgctccatcagc

SEQ ID NO: 33883 - RNA, 22 nt, synthetic construct
  source 1..22: mol_type = other RNA
ccaggccagccaagtaccccct

SEQ ID NO: 33884 - RNA, 22 nt, synthetic construct
  source 1..22: mol_type = other RNA
ccaggctccaccagccccttcg

SEQ ID NO: 33885 - RNA, 22 nt, synthetic construct
  source 1..22: mol_type = other RNA
ccagtggattcactgtccacgg

SEQ ID NO: 33886 - RNA, 22 nt, synthetic construct
  source 1..22: mol_type = other RNA
ccatcagccactgacctgccca

SEQ ID NO: 33887 - RNA, 22 nt, synthetic construct
  source 1..22: mol_type = other RNA
cccaacatctccagaccggcca

SEQ ID NO: 33888 - RNA, 22 nt, synthetic construct
  source 1..22: mol_type = other RNA
cccaatgtaggtgaggtgcccc

SEQ ID NO: 33889 - RNA, 22 nt, synthetic construct
  source 1..22: mol_type = other RNA
cccagcatgcctgaacctgccc

SEQ ID NO: 33890 - RNA, 22 nt, synthetic construct
  source 1..22: mol_type = other RNA
cccaggccagccaagtaccccc

SEQ ID NO: 33891 - RNA, 22 nt, synthetic construct
  source 1..22: mol_type = other RNA
cccagtggattcactgtccacg

SEQ ID NO: 33892 - RNA, 22 nt, synthetic construct
  source 1..22: mol_type = other RNA
ccccaatgtaggtgaggtgccc

SEQ ID NO: 33893 - RNA, 22 nt, synthetic construct
  source 1..22: mol_type = other RNA
ccccaggccagccaagtacccc

SEQ ID NO: 33894 - RNA, 22 nt, synthetic construct
  source 1..22: mol_type = other RNA
cccccaatgtaggtgaggtgcc

SEQ ID NO: 33895 - RNA, 22 nt, synthetic construct
  source 1..22: mol_type = other RNA
ccccctcccagtggattcactg

SEQ ID NO: 33896 - RNA, 22 nt, synthetic construct
  source 1..22: mol_type = other RNA
cccctcccagtggattcactgt

SEQ ID NO: 33897 - RNA, 22 nt, synthetic construct
  source 1..22: mol_type = other RNA
ccccttcgctccatcagccact

SEQ ID NO: 33898 - RNA, 22 nt, synthetic construct
  source 1..22: mol_type = other RNA
cccgagcaaacatgacaggtaa

SEQ ID NO: 33899 - RNA, 22 nt, synthetic construct
  source 1..22: mol_type = other RNA
ccctaagggtccttacctgtca

SEQ ID NO: 33900 - RNA, 22 nt, synthetic construct
  source 1..22: mol_type = other RNA
ccctcccagtggattcactgtc

SEQ ID NO: 33901 - RNA, 22 nt, synthetic construct
  source 1..22: mol_type = other RNA
ccctgacctcccgagcaaacat

SEQ ID NO: 33902 - RNA, 22 nt, synthetic construct
  source 1..22: mol_type = other RNA
cccttagggcctgtgagaggta

SEQ ID NO: 33903 - RNA, 22 nt, synthetic construct
  source 1..22: mol_type = other RNA
cccttcgctccatcagccactg

SEQ ID NO: 33904 - RNA, 22 nt, synthetic construct
  source 1..22: mol_type = other RNA
ccgagcaaacatgacaggtaag

SEQ ID NO: 33905 - RNA, 22 nt, synthetic construct
  source 1..22: mol_type = other RNA
ccggtctggagatgttgggagg

SEQ ID NO: 33906 - RNA, 22 nt, synthetic construct
  source 1..22: mol_type = other RNA
ccgtggacagtgaatccactgg

SEQ ID NO: 33907 - RNA, 22 nt, synthetic construct
  source 1..22: mol_type = other RNA
cctaagggtccttacctgtcat

SEQ ID NO: 33908 - RNA, 22 nt, synthetic construct
  source 1..22: mol_type = other RNA
cctacattgggggtggagagtg

SEQ ID NO: 33909 - RNA, 22 nt, synthetic construct
  source 1..22: mol_type = other RNA
cctcacctacattgggggtgga

SEQ ID NO: 33910 - RNA, 22 nt, synthetic construct
  source 1..22: mol_type = other RNA
cctcccaacatctccagaccgg

SEQ ID NO: 33911 - RNA, 22 nt, synthetic construct
  source 1..22: mol_type = other RNA
cctcccagtggattcactgtcc

SEQ ID NO: 33912 - RNA, 22 nt, synthetic construct
  source 1..22: mol_type = other RNA
cctcccgagcaaacatgacagg

SEQ ID NO: 33913 - RNA, 22 nt, synthetic construct
  source 1..22: mol_type = other RNA
cctctcacaggccctaagggtc

SEQ ID NO: 33914 - RNA, 22 nt, synthetic construct
  source 1..22: mol_type = other RNA
cctgaacctgccctgacctccc

SEQ ID NO: 33915 - RNA, 22 nt, synthetic construct
  source 1..22: mol_type = other RNA
cctgacctcccgagcaaacatg

SEQ ID NO: 33916 - RNA, 22 nt, synthetic construct
  source 1..22: mol_type = other RNA
cctgcccagcatgcctgaacct

SEQ ID NO: 33917 - RNA, 22 nt, synthetic construct
  source 1..22: mol_type = other RNA
cctgccctgacctcccgagcaa

SEQ ID NO: 33918 - RNA, 22 nt, synthetic construct
  source 1..22: mol_type = other RNA
cctgcttctagtacctctcaca

SEQ ID NO: 33919 - RNA, 22 nt, synthetic construct
  source 1..22: mol_type = other RNA
cctggccggtctggagatgttg

SEQ ID NO: 33920 - RNA, 22 nt, synthetic construct
  source 1..22: mol_type = other RNA
cctggggcacctcacctacatt

SEQ ID NO: 33921 - RNA, 22 nt, synthetic construct
  source 1..22: mol_type = other RNA
cctggttattctcacaccactc

SEQ ID NO: 33922 - RNA, 22 nt, synthetic construct
  source 1..22: mol_type = other RNA
cctgtcatgtttgctcgggagg

SEQ ID NO: 33923 - RNA, 22 nt, synthetic construct
  source 1..22: mol_type = other RNA
ccttacctgtcatgtttgctcg

SEQ ID NO: 33924 - RNA, 22 nt, synthetic construct
  source 1..22: mol_type = other RNA
ccttagggcctgtgagaggtac

SEQ ID NO: 33925 - RNA, 22 nt, synthetic construct
  source 1..22: mol_type = other RNA
ccttcgctccatcagccactga

SEQ ID NO: 33926 - RNA, 22 nt, synthetic construct
  source 1..22: mol_type = other RNA
cgaaggggctggtggagcctgg

SEQ ID NO: 33927 - RNA, 22 nt, synthetic construct
  source 1..22: mol_type = other RNA
cgagcaaacatgacaggtaagg

SEQ ID NO: 33928 - RNA, 22 nt, synthetic construct
  source 1..22: mol_type = other RNA
cgatcctgcttctagtacctct

SEQ ID NO: 33929 - RNA, 22 nt, synthetic construct
  source 1..22: mol_type = other RNA
cgctccatcagccactgacctg

SEQ ID NO: 33930 - RNA, 22 nt, synthetic construct
  source 1..22: mol_type = other RNA
cggccaggctccaccagcccct

SEQ ID NO: 33931 - RNA, 22 nt, synthetic construct
  source 1..22: mol_type = other RNA
cggcctcccaacatctccagac

SEQ ID NO: 33932 - RNA, 22 nt, synthetic construct
  source 1..22: mol_type = other RNA
cgggaggtcagggcaggttcag

SEQ ID NO: 33933 - RNA, 22 nt, synthetic construct
  source 1..22: mol_type = other RNA
cggtctggagatgttgggaggc

SEQ ID NO: 33934 - RNA, 22 nt, synthetic construct
  source 1..22: mol_type = other RNA
cgtggacagtgaatccactggg

SEQ ID NO: 33935 - RNA, 22 nt, synthetic construct
  source 1..22: mol_type = other RNA
ctaagggtccttacctgtcatg

SEQ ID NO: 33936 - RNA, 22 nt, synthetic construct
  source 1..22: mol_type = other RNA
ctacattgggggtggagagtgg

SEQ ID NO: 33937 - RNA, 22 nt, synthetic construct
  source 1..22: mol_type = other RNA
ctagtacctctcacaggcccta

SEQ ID NO: 33938 - RNA, 22 nt, synthetic construct
  source 1..22: mol_type = other RNA
ctcacaccactctccaccccca

SEQ ID NO: 33939 - RNA, 22 nt, synthetic construct
  source 1..22: mol_type = other RNA
ctcacaggccctaagggtcctt

SEQ ID NO: 33940 - RNA, 22 nt, synthetic construct
  source 1..22: mol_type = other RNA
ctcacctacattgggggtggag

SEQ ID NO: 33941 - RNA, 22 nt, synthetic construct
  source 1..22: mol_type = other RNA
ctccaccagccccttcgctcca

SEQ ID NO: 33942 - RNA, 22 nt, synthetic construct
  source 1..22: mol_type = other RNA
ctccacccccaatgtaggtgag

SEQ ID NO: 33943 - RNA, 22 nt, synthetic construct
  source 1..22: mol_type = other RNA
ctccagaccggccaggctccac

SEQ ID NO: 33944 - RNA, 22 nt, synthetic construct
  source 1..22: mol_type = other RNA
ctccatcagccactgacctgcc

SEQ ID NO: 33945 - RNA, 22 nt, synthetic construct
  source 1..22: mol_type = other RNA
ctcccaacatctccagaccggc

SEQ ID NO: 33946 - RNA, 22 nt, synthetic construct
  source 1..22: mol_type = other RNA
ctcccagtggattcactgtcca

SEQ ID NO: 33947 - RNA, 22 nt, synthetic construct
  source 1..22: mol_type = other RNA
ctcccgagcaaacatgacaggt

SEQ ID NO: 33948 - RNA, 22 nt, synthetic construct
  source 1..22: mol_type = other RNA
ctcgggaggtcagggcaggttc

SEQ ID NO: 33949 - RNA, 22 nt, synthetic construct
  source 1..22: mol_type = other RNA
ctctcacaggccctaagggtcc

SEQ ID NO: 33950 - RNA, 22 nt, synthetic construct
  source 1..22: mol_type = other RNA
ctctccacccccaatgtaggtg

SEQ ID NO: 33951 - RNA, 22 nt, synthetic construct
  source 1..22: mol_type = other RNA
ctgaacctgccctgacctcccg

SEQ ID NO: 33952 - RNA, 22 nt, synthetic construct
  source 1..22: mol_type = other RNA
ctgacctcccgagcaaacatga

SEQ ID NO: 33953 - RNA, 22 nt, synthetic construct
  source 1..22: mol_type = other RNA
ctgacctgcccagcatgcctga

SEQ ID NO: 33954 - RNA, 22 nt, synthetic construct
  source 1..22: mol_type = other RNA
ctgatggagcgaaggggctggt

SEQ ID NO: 33955 - RNA, 22 nt, synthetic construct
  source 1..22: mol_type = other RNA
ctgcccagcatgcctgaacctg

SEQ ID NO: 33956 - RNA, 22 nt, synthetic construct
  source 1..22: mol_type = other RNA
ctgccctgacctcccgagcaaa

SEQ ID NO: 33957 - RNA, 22 nt, synthetic construct
  source 1..22: mol_type = other RNA
ctgcttctagtacctctcacag

SEQ ID NO: 33958 - RNA, 22 nt, synthetic construct
  source 1..22: mol_type = other RNA
ctggagatgttgggaggccgtg

SEQ ID NO: 33959 - RNA, 22 nt, synthetic construct
  source 1..22: mol_type = other RNA
ctggccggtctggagatgttgg

SEQ ID NO: 33960 - RNA, 22 nt, synthetic construct
  source 1..22: mol_type = other RNA
ctggcctggggcacctcaccta

SEQ ID NO: 33961 - RNA, 22 nt, synthetic construct
  source 1..22: mol_type = other RNA
ctgggagggggtacttggctgg

SEQ ID NO: 33962 - RNA, 22 nt, synthetic construct
  source 1..22: mol_type = other RNA
ctgggcaggtcagtggctgatg

SEQ ID NO: 33963 - RNA, 22 nt, synthetic construct
  source 1..22: mol_type = other RNA
ctggggcacctcacctacattg

SEQ ID NO: 33964 - RNA, 22 nt, synthetic construct
  source 1..22: mol_type = other RNA
ctggtggagcctggccggtctg

SEQ ID NO: 33965 - RNA, 22 nt, synthetic construct
  source 1..22: mol_type = other RNA
ctggttattctcacaccactct

SEQ ID NO: 33966 - RNA, 22 nt, synthetic construct
  source 1..22: mol_type = other RNA
ctgtcatgtttgctcgggaggt

SEQ ID NO: 33967 - RNA, 22 nt, synthetic construct
  source 1..22: mol_type = other RNA
ctgtccacggcctcccaacatc

SEQ ID NO: 33968 - RNA, 22 nt, synthetic construct
  source 1..22: mol_type = other RNA
cttacctgtcatgtttgctcgg

SEQ ID NO: 33969 - RNA, 22 nt, synthetic construct
  source 1..22: mol_type = other RNA
cttagggcctgtgagaggtact

SEQ ID NO: 33970 - RNA, 22 nt, synthetic construct
  source 1..22: mol_type = other RNA
cttcgctccatcagccactgac

SEQ ID NO: 33971 - RNA, 22 nt, synthetic construct
  source 1..22: mol_type = other RNA
cttctagtacctctcacaggcc

SEQ ID NO: 33972 - RNA, 22 nt, synthetic construct
  source 1..22: mol_type = other RNA
cttggctggcctggggcacctc

SEQ ID NO: 33973 - RNA, 22 nt, synthetic construct
  source 1..22: mol_type = other RNA
gaacctgccctgacctcccgag

SEQ ID NO: 33974 - RNA, 22 nt, synthetic construct
  source 1..22: mol_type = other RNA
gaaggggctggtggagcctggc

SEQ ID NO: 33975 - RNA, 22 nt, synthetic construct
  source 1..22: mol_type = other RNA
gaatccactgggagggggtact

SEQ ID NO: 33976 - RNA, 22 nt, synthetic construct
  source 1..22: mol_type = other RNA
gacaggtaaggacccttagggc

SEQ ID NO: 33977 - RNA, 22 nt, synthetic construct
  source 1..22: mol_type = other RNA
gacagtgaatccactgggaggg

SEQ ID NO: 33978 - RNA, 22 nt, synthetic construct
  source 1..22: mol_type = other RNA
gacccttagggcctgtgagagg

SEQ ID NO: 33979 - RNA, 22 nt, synthetic construct
  source 1..22: mol_type = other RNA
gaccggccaggctccaccagcc

SEQ ID NO: 33980 - RNA, 22 nt, synthetic construct
  source 1..22: mol_type = other RNA
gacctcccgagcaaacatgaca

SEQ ID NO: 33981 - RNA, 22 nt, synthetic construct
  source 1..22: mol_type = other RNA
gacctgcccagcatgcctgaac

SEQ ID NO: 33982 - RNA, 22 nt, synthetic construct
  source 1..22: mol_type = other RNA
gagagtggtgtgagaataacca

SEQ ID NO: 33983 - RNA, 22 nt, synthetic construct
  source 1..22: mol_type = other RNA
gagatgttgggaggccgtggac

SEQ ID NO: 33984 - RNA, 22 nt, synthetic construct
  source 1..22: mol_type = other RNA
gagcaaacatgacaggtaagga

SEQ ID NO: 33985 - RNA, 22 nt, synthetic construct
  source 1..22: mol_type = other RNA
gagcctggccggtctggagatg

SEQ ID NO: 33986 - RNA, 22 nt, synthetic construct
  source 1..22: mol_type = other RNA
gagcgaaggggctggtggagcc

SEQ ID NO: 33987 - RNA, 22 nt, synthetic construct
  source 1..22: mol_type = other RNA
gaggccgtggacagtgaatcca

SEQ ID NO: 33988 - RNA, 22 nt, synthetic construct
  source 1..22: mol_type = other RNA
gagggggtacttggctggcctg

SEQ ID NO: 33989 - RNA, 22 nt, synthetic construct
  source 1..22: mol_type = other RNA
gaggtcagggcaggttcaggca

SEQ ID NO: 33990 - RNA, 22 nt, synthetic construct
  source 1..22: mol_type = other RNA
gaggtgccccaggccagccaag

SEQ ID NO: 33991 - RNA, 22 nt, synthetic construct
  source 1..22: mol_type = other RNA
gagtggtgtgagaataaccagg

SEQ ID NO: 33992 - RNA, 22 nt, synthetic construct
  source 1..22: mol_type = other RNA
gatcctgcttctagtacctctc

SEQ ID NO: 33993 - RNA, 22 nt, synthetic construct
  source 1..22: mol_type = other RNA
gatggagcgaaggggctggtgg

SEQ ID NO: 33994 - RNA, 22 nt, synthetic construct
  source 1..22: mol_type = other RNA
gatgttgggaggccgtggacag

SEQ ID NO: 33995 - RNA, 22 nt, synthetic construct
  source 1..22: mol_type = other RNA
gattcactgtccacggcctccc

SEQ ID NO: 33996 - RNA, 22 nt, synthetic construct
  source 1..22: mol_type = other RNA
gcaaacatgacaggtaaggacc

SEQ ID NO: 33997 - RNA, 22 nt, synthetic construct
  source 1..22: mol_type = other RNA
gcacctcacctacattgggggt

SEQ ID NO: 33998 - RNA, 22 nt, synthetic construct
  source 1..22: mol_type = other RNA
gcaggtcagtggctgatggagc

SEQ ID NO: 33999 - RNA, 22 nt, synthetic construct
  source 1..22: mol_type = other RNA
gcaggttcaggcatgctgggca

SEQ ID NO: 34000 - RNA, 22 nt, synthetic construct
  source 1..22: mol_type = other RNA
gcatgcctgaacctgccctgac

SEQ ID NO: 34001 - RNA, 22 nt, synthetic construct
  source 1..22: mol_type = other RNA
gcatgctgggcaggtcagtggc

SEQ ID NO: 34002 - RNA, 22 nt, synthetic construct
  source 1..22: mol_type = other RNA
gccaagtaccccctcccagtgg

SEQ ID NO: 34003 - RNA, 22 nt, synthetic construct
  source 1..22: mol_type = other RNA
gccactgacctgcccagcatgc

SEQ ID NO: 34004 - RNA, 22 nt, synthetic construct
  source 1..22: mol_type = other RNA
gccagccaagtaccccctccca

SEQ ID NO: 34005 - RNA, 22 nt, synthetic construct
  source 1..22: mol_type = other RNA
gccaggctccaccagccccttc

SEQ ID NO: 34006 - RNA, 22 nt, synthetic construct
  source 1..22: mol_type = other RNA
gcccagcatgcctgaacctgcc

SEQ ID NO: 34007 - RNA, 22 nt, synthetic construct
  source 1..22: mol_type = other RNA
gccccaggccagccaagtaccc

SEQ ID NO: 34008 - RNA, 22 nt, synthetic construct
  source 1..22: mol_type = other RNA
gccccttcgctccatcagccac

SEQ ID NO: 34009 - RNA, 22 nt, synthetic construct
  source 1..22: mol_type = other RNA
gccctaagggtccttacctgtc

SEQ ID NO: 34010 - RNA, 22 nt, synthetic construct
  source 1..22: mol_type = other RNA
gccctgacctcccgagcaaaca

SEQ ID NO: 34011 - RNA, 22 nt, synthetic construct
  source 1..22: mol_type = other RNA
gccggtctggagatgttgggag

SEQ ID NO: 34012 - RNA, 22 nt, synthetic construct
  source 1..22: mol_type = other RNA
gccgtggacagtgaatccactg

SEQ ID NO: 34013 - RNA, 22 nt, synthetic construct
  source 1..22: mol_type = other RNA
gcctcccaacatctccagaccg

SEQ ID NO: 34014 - RNA, 22 nt, synthetic construct
  source 1..22: mol_type = other RNA
gcctgaacctgccctgacctcc

SEQ ID NO: 34015 - RNA, 22 nt, synthetic construct
  source 1..22: mol_type = other RNA
gcctggccggtctggagatgtt

SEQ ID NO: 34016 - RNA, 22 nt, synthetic construct
  source 1..22: mol_type = other RNA
gcctggggcacctcacctacat

SEQ ID NO: 34017 - RNA, 22 nt, synthetic construct
  source 1..22: mol_type = other RNA
gcctgtgagaggtactagaagc

SEQ ID NO: 34018 - RNA, 22 nt, synthetic construct
  source 1..22: mol_type = other RNA
gcgaaggggctggtggagcctg

SEQ ID NO: 34019 - RNA, 22 nt, synthetic construct
  source 1..22: mol_type = other RNA
gctccaccagccccttcgctcc

SEQ ID NO: 34020 - RNA, 22 nt, synthetic construct
  source 1..22: mol_type = other RNA
gctccatcagccactgacctgc

SEQ ID NO: 34021 - RNA, 22 nt, synthetic construct
  source 1..22: mol_type = other RNA
gctcgggaggtcagggcaggtt

SEQ ID NO: 34022 - RNA, 22 nt, synthetic construct
  source 1..22: mol_type = other RNA
gctgatggagcgaaggggctgg

SEQ ID NO: 34023 - RNA, 22 nt, synthetic construct
  source 1..22: mol_type = other RNA
gctggcctggggcacctcacct

SEQ ID NO: 34024 - RNA, 22 nt, synthetic construct
  source 1..22: mol_type = other RNA
gctgggcaggtcagtggctgat

SEQ ID NO: 34025 - RNA, 22 nt, synthetic construct
  source 1..22: mol_type = other RNA
gctggtggagcctggccggtct

SEQ ID NO: 34026 - RNA, 22 nt, synthetic construct
  source 1..22: mol_type = other RNA
gcttctagtacctctcacaggc

SEQ ID NO: 34027 - RNA, 22 nt, synthetic construct
  source 1..22: mol_type = other RNA
ggacagtgaatccactgggagg

SEQ ID NO: 34028 - RNA, 22 nt, synthetic construct
  source 1..22: mol_type = other RNA
ggacccttagggcctgtgagag

SEQ ID NO: 34029 - RNA, 22 nt, synthetic construct
  source 1..22: mol_type = other RNA
ggagagtggtgtgagaataacc

SEQ ID NO: 34030 - RNA, 22 nt, synthetic construct
  source 1..22: mol_type = other RNA
ggagatgttgggaggccgtgga

SEQ ID NO: 34031 - RNA, 22 nt, synthetic construct
  source 1..22: mol_type = other RNA
ggagcctggccggtctggagat

SEQ ID NO: 34032 - RNA, 22 nt, synthetic construct
  source 1..22: mol_type = other RNA
ggagcgaaggggctggtggagc

SEQ ID NO: 34033 - RNA, 22 nt, synthetic construct
  source 1..22: mol_type = other RNA
ggaggccgtggacagtgaatcc

SEQ ID NO: 34034 - RNA, 22 nt, synthetic construct
  source 1..22: mol_type = other RNA
ggagggggtacttggctggcct

SEQ ID NO: 34035 - RNA, 22 nt, synthetic construct
  source 1..22: mol_type = other RNA
ggaggtcagggcaggttcaggc

SEQ ID NO: 34036 - RNA, 22 nt, synthetic construct
  source 1..22: mol_type = other RNA
ggattcactgtccacggcctcc

SEQ ID NO: 34037 - RNA, 22 nt, synthetic construct
  source 1..22: mol_type = other RNA
ggcacctcacctacattggggg

SEQ ID NO: 34038 - RNA, 22 nt, synthetic construct
  source 1..22: mol_type = other RNA
ggcaggtcagtggctgatggag

SEQ ID NO: 34039 - RNA, 22 nt, synthetic construct
  source 1..22: mol_type = other RNA
ggcaggttcaggcatgctgggc

SEQ ID NO: 34040 - RNA, 22 nt, synthetic construct
  source 1..22: mol_type = other RNA
ggcatgctgggcaggtcagtgg

SEQ ID NO: 34041 - RNA, 22 nt, synthetic construct
  source 1..22: mol_type = other RNA
ggccagccaagtaccccctccc

SEQ ID NO: 34042 - RNA, 22 nt, synthetic construct
  source 1..22: mol_type = other RNA
ggccaggctccaccagcccctt

SEQ ID NO: 34043 - RNA, 22 nt, synthetic construct
  source 1..22: mol_type = other RNA
ggccctaagggtccttacctgt

SEQ ID NO: 34044 - RNA, 22 nt, synthetic construct
  source 1..22: mol_type = other RNA
ggccggtctggagatgttggga

SEQ ID NO: 34045 - RNA, 22 nt, synthetic construct
  source 1..22: mol_type = other RNA
ggccgtggacagtgaatccact

SEQ ID NO: 34046 - RNA, 22 nt, synthetic construct
  source 1..22: mol_type = other RNA
ggcctcccaacatctccagacc

SEQ ID NO: 34047 - RNA, 22 nt, synthetic construct
  source 1..22: mol_type = other RNA
ggcctggggcacctcacctaca

SEQ ID NO: 34048 - RNA, 22 nt, synthetic construct
  source 1..22: mol_type = other RNA
ggcctgtgagaggtactagaag

SEQ ID NO: 34049 - RNA, 22 nt, synthetic construct
  source 1..22: mol_type = other RNA
ggctccaccagccccttcgctc

SEQ ID NO: 34050 - RNA, 22 nt, synthetic construct
  source 1..22: mol_type = other RNA
ggctgatggagcgaaggggctg

SEQ ID NO: 34051 - RNA, 22 nt, synthetic construct
  source 1..22: mol_type = other RNA
ggctggcctggggcacctcacc

SEQ ID NO: 34052 - RNA, 22 nt, synthetic construct
  source 1..22: mol_type = other RNA
ggctggtggagcctggccggtc

SEQ ID NO: 34053 - RNA, 22 nt, synthetic construct
  source 1..22: mol_type = other RNA
gggaggccgtggacagtgaatc

SEQ ID NO: 34054 - RNA, 22 nt, synthetic construct
  source 1..22: mol_type = other RNA
gggagggggtacttggctggcc

SEQ ID NO: 34055 - RNA, 22 nt, synthetic construct
  source 1..22: mol_type = other RNA
gggaggtcagggcaggttcagg

SEQ ID NO: 34056 - RNA, 22 nt, synthetic construct
  source 1..22: mol_type = other RNA
gggcacctcacctacattgggg

SEQ ID NO: 34057 - RNA, 22 nt, synthetic construct
  source 1..22: mol_type = other RNA
gggcaggtcagtggctgatgga

SEQ ID NO: 34058 - RNA, 22 nt, synthetic construct
  source 1..22: mol_type = other RNA
gggcaggttcaggcatgctggg

SEQ ID NO: 34059 - RNA, 22 nt, synthetic construct
  source 1..22: mol_type = other RNA
gggcctgtgagaggtactagaa

SEQ ID NO: 34060 - RNA, 22 nt, synthetic construct
  source 1..22: mol_type = other RNA
gggctggtggagcctggccggt

SEQ ID NO: 34061 - RNA, 22 nt, synthetic construct
  source 1..22: mol_type = other RNA
ggggcacctcacctacattggg

SEQ ID NO: 34062 - RNA, 22 nt, synthetic construct
  source 1..22: mol_type = other RNA
gggggtacttggctggcctggg

SEQ ID NO: 34063 - RNA, 22 nt, synthetic construct
  source 1..22: mol_type = other RNA
gggggtggagagtggtgtgaga

SEQ ID NO: 34064 - RNA, 22 nt, synthetic construct
  source 1..22: mol_type = other RNA
ggggtacttggctggcctgggg

SEQ ID NO: 34065 - RNA, 22 nt, synthetic construct
  source 1..22: mol_type = other RNA
ggggtggagagtggtgtgagaa

SEQ ID NO: 34066 - RNA, 22 nt, synthetic construct
  source 1..22: mol_type = other RNA
gggtacttggctggcctggggc

SEQ ID NO: 34067 - RNA, 22 nt, synthetic construct
  source 1..22: mol_type = other RNA
gggtccttacctgtcatgtttg

SEQ ID NO: 34068 - RNA, 22 nt, synthetic construct
  source 1..22: mol_type = other RNA
gggtggagagtggtgtgagaat

SEQ ID NO: 34069 - RNA, 22 nt, synthetic construct
  source 1..22: mol_type = other RNA
ggtaaggacccttagggcctgt

SEQ ID NO: 34070 - RNA, 22 nt, synthetic construct
  source 1..22: mol_type = other RNA
ggtacttggctggcctggggca

SEQ ID NO: 34071 - RNA, 22 nt, synthetic construct
  source 1..22: mol_type = other RNA
ggtcagggcaggttcaggcatg

SEQ ID NO: 34072 - RNA, 22 nt, synthetic construct
  source 1..22: mol_type = other RNA
ggtcagtggctgatggagcgaa

SEQ ID NO: 34073 - RNA, 22 nt, synthetic construct
  source 1..22: mol_type = other RNA
ggtccttacctgtcatgtttgc

SEQ ID NO: 34074 - RNA, 22 nt, synthetic construct
  source 1..22: mol_type = other RNA
ggtctggagatgttgggaggcc

SEQ ID NO: 34075 - RNA, 22 nt, synthetic construct
  source 1..22: mol_type = other RNA
ggtgaggtgccccaggccagcc

SEQ ID NO: 34076 - RNA, 22 nt, synthetic construct
  source 1..22: mol_type = other RNA
ggtgccccaggccagccaagta

SEQ ID NO: 34077 - RNA, 22 nt, synthetic construct
  source 1..22: mol_type = other RNA
ggtggagagtggtgtgagaata

SEQ ID NO: 34078 - RNA, 22 nt, synthetic construct
  source 1..22: mol_type = other RNA
ggtggagcctggccggtctgga

SEQ ID NO: 34079 - RNA, 22 nt, synthetic construct
  source 1..22: mol_type = other RNA
ggttattctcacaccactctcc

SEQ ID NO: 34080 - RNA, 22 nt, synthetic construct
  source 1..22: mol_type = other RNA
ggttcaggcatgctgggcaggt

SEQ ID NO: 34081 - RNA, 22 nt, synthetic construct
  source 1..22: mol_type = other RNA
gtaaggacccttagggcctgtg

SEQ ID NO: 34082 - RNA, 22 nt, synthetic construct
  source 1..22: mol_type = other RNA
gtaccccctcccagtggattca

SEQ ID NO: 34083 - RNA, 22 nt, synthetic construct
  source 1..22: mol_type = other RNA
gtacctctcacaggccctaagg

SEQ ID NO: 34084 - RNA, 22 nt, synthetic construct
  source 1..22: mol_type = other RNA
gtacttggctggcctggggcac

SEQ ID NO: 34085 - RNA, 22 nt, synthetic construct
  source 1..22: mol_type = other RNA
gtaggtgaggtgccccaggcca

SEQ ID NO: 34086 - RNA, 22 nt, synthetic construct
  source 1..22: mol_type = other RNA
gtcagggcaggttcaggcatgc

SEQ ID NO: 34087 - RNA, 22 nt, synthetic construct
  source 1..22: mol_type = other RNA
gtcagtggctgatggagcgaag

SEQ ID NO: 34088 - RNA, 22 nt, synthetic construct
  source 1..22: mol_type = other RNA
gtcatgtttgctcgggaggtca

SEQ ID NO: 34089 - RNA, 22 nt, synthetic construct
  source 1..22: mol_type = other RNA
gtccacggcctcccaacatctc

SEQ ID NO: 34090 - RNA, 22 nt, synthetic construct
  source 1..22: mol_type = other RNA
gtccttacctgtcatgtttgct

SEQ ID NO: 34091 - RNA, 22 nt, synthetic construct
  source 1..22: mol_type = other RNA
gtctggagatgttgggaggccg

SEQ ID NO: 34092 - RNA, 22 nt, synthetic construct
  source 1..22: mol_type = other RNA
gtgaatccactgggagggggta

SEQ ID NO: 34093 - RNA, 22 nt, synthetic construct
  source 1..22: mol_type = other RNA
gtgaggtgccccaggccagcca

SEQ ID NO: 34094 - RNA, 22 nt, synthetic construct
  source 1..22: mol_type = other RNA
gtgccccaggccagccaagtac

SEQ ID NO: 34095 - RNA, 22 nt, synthetic construct
  source 1..22: mol_type = other RNA
gtggacagtgaatccactggga

SEQ ID NO: 34096 - RNA, 22 nt, synthetic construct
  source 1..22: mol_type = other RNA
gtggagagtggtgtgagaataa

SEQ ID NO: 34097 - RNA, 22 nt, synthetic construct
  source 1..22: mol_type = other RNA
gtggagcctggccggtctggag

SEQ ID NO: 34098 - RNA, 22 nt, synthetic construct
  source 1..22: mol_type = other RNA
gtggattcactgtccacggcct

SEQ ID NO: 34099 - RNA, 22 nt, synthetic construct
  source 1..22: mol_type = other RNA
gtggctgatggagcgaaggggc

SEQ ID NO: 34100 - RNA, 22 nt, synthetic construct
  source 1..22: mol_type = other RNA
gttattctcacaccactctcca

SEQ ID NO: 34101 - RNA, 22 nt, synthetic construct
  source 1..22: mol_type = other RNA
gttcaggcatgctgggcaggtc

SEQ ID NO: 34102 - RNA, 22 nt, synthetic construct
  source 1..22: mol_type = other RNA
gttgggaggccgtggacagtga

SEQ ID NO: 34103 - RNA, 22 nt, synthetic construct
  source 1..22: mol_type = other RNA
gtttgctcgggaggtcagggca

SEQ ID NO: 34104 - RNA, 22 nt, synthetic construct
  source 1..22: mol_type = other RNA
taaggacccttagggcctgtga

SEQ ID NO: 34105 - RNA, 22 nt, synthetic construct
  source 1..22: mol_type = other RNA
taagggtccttacctgtcatgt

SEQ ID NO: 34106 - RNA, 22 nt, synthetic construct
  source 1..22: mol_type = other RNA
tacattgggggtggagagtggt

SEQ ID NO: 34107 - RNA, 22 nt, synthetic construct
  source 1..22: mol_type = other RNA
taccccctcccagtggattcac

SEQ ID NO: 34108 - RNA, 22 nt, synthetic construct
  source 1..22: mol_type = other RNA
tacctctcacaggccctaaggg

SEQ ID NO: 34109 - RNA, 22 nt, synthetic construct
  source 1..22: mol_type = other RNA
tacctggttattctcacaccac

SEQ ID NO: 34110 - RNA, 22 nt, synthetic construct
  source 1..22: mol_type = other RNA
tacctgtcatgtttgctcggga

SEQ ID NO: 34111 - RNA, 22 nt, synthetic construct
  source 1..22: mol_type = other RNA
tacttggctggcctggggcacc

SEQ ID NO: 34112 - RNA, 22 nt, synthetic construct
  source 1..22: mol_type = other RNA
tagggcctgtgagaggtactag

SEQ ID NO: 34113 - RNA, 22 nt, synthetic construct
  source 1..22: mol_type = other RNA
taggtgaggtgccccaggccag

SEQ ID NO: 34114 - RNA, 22 nt, synthetic construct
  source 1..22: mol_type = other RNA
tagtacctctcacaggccctaa

SEQ ID NO: 34115 - RNA, 22 nt, synthetic construct
  source 1..22: mol_type = other RNA
tattctcacaccactctccacc

SEQ ID NO: 34116 - RNA, 22 nt, synthetic construct
  source 1..22: mol_type = other RNA
tcaatacctggttattctcaca

SEQ ID NO: 34117 - RNA, 22 nt, synthetic construct
  source 1..22: mol_type = other RNA
tcacaccactctccacccccaa

SEQ ID NO: 34118 - RNA, 22 nt, synthetic construct
  source 1..22: mol_type = other RNA
tcacaggccctaagggtcctta

SEQ ID NO: 34119 - RNA, 22 nt, synthetic construct
  source 1..22: mol_type = other RNA
tcacctacattgggggtggaga

SEQ ID NO: 34120 - RNA, 22 nt, synthetic construct
  source 1..22: mol_type = other RNA
tcactgtccacggcctcccaac

SEQ ID NO: 34121 - RNA, 22 nt, synthetic construct
  source 1..22: mol_type = other RNA
tcagccactgacctgcccagca

SEQ ID NO: 34122 - RNA, 22 nt, synthetic construct
  source 1..22: mol_type = other RNA
tcaggcatgctgggcaggtcag

SEQ ID NO: 34123 - RNA, 22 nt, synthetic construct
  source 1..22: mol_type = other RNA
tcagggcaggttcaggcatgct

SEQ ID NO: 34124 - RNA, 22 nt, synthetic construct
  source 1..22: mol_type = other RNA
tcagtggctgatggagcgaagg

SEQ ID NO: 34125 - RNA, 22 nt, synthetic construct
  source 1..22: mol_type = other RNA
tcatgtttgctcgggaggtcag

SEQ ID NO: 34126 - RNA, 22 nt, synthetic construct
  source 1..22: mol_type = other RNA
tccaccagccccttcgctccat

SEQ ID NO: 34127 - RNA, 22 nt, synthetic construct
  source 1..22: mol_type = other RNA
tccacccccaatgtaggtgagg

SEQ ID NO: 34128 - RNA, 22 nt, synthetic construct
  source 1..22: mol_type = other RNA
tccacggcctcccaacatctcc

SEQ ID NO: 34129 - RNA, 22 nt, synthetic construct
  source 1..22: mol_type = other RNA
tccactgggagggggtacttgg

SEQ ID NO: 34130 - RNA, 22 nt, synthetic construct
  source 1..22: mol_type = other RNA
tccagaccggccaggctccacc

SEQ ID NO: 34131 - RNA, 22 nt, synthetic construct
  source 1..22: mol_type = other RNA
tccatcagccactgacctgccc

SEQ ID NO: 34132 - RNA, 22 nt, synthetic construct
  source 1..22: mol_type = other RNA
tcccaacatctccagaccggcc

SEQ ID NO: 34133 - RNA, 22 nt, synthetic construct
  source 1..22: mol_type = other RNA
tcccagtggattcactgtccac

SEQ ID NO: 34134 - RNA, 22 nt, synthetic construct
  source 1..22: mol_type = other RNA
tcccgagcaaacatgacaggta

SEQ ID NO: 34135 - RNA, 22 nt, synthetic construct
  source 1..22: mol_type = other RNA
tcctgcttctagtacctctcac

SEQ ID NO: 34136 - RNA, 22 nt, synthetic construct
  source 1..22: mol_type = other RNA
tccttacctgtcatgtttgctc

SEQ ID NO: 34137 - RNA, 22 nt, synthetic construct
  source 1..22: mol_type = other RNA
tcgatcctgcttctagtacctc

SEQ ID NO: 34138 - RNA, 22 nt, synthetic construct
  source 1..22: mol_type = other RNA
tcgctccatcagccactgacct

SEQ ID NO: 34139 - RNA, 22 nt, synthetic construct
  source 1..22: mol_type = other RNA
tcgggaggtcagggcaggttca

SEQ ID NO: 34140 - RNA, 22 nt, synthetic construct
  source 1..22: mol_type = other RNA
tctagtacctctcacaggccct

SEQ ID NO: 34141 - RNA, 22 nt, synthetic construct
  source 1..22: mol_type = other RNA
tctcacaccactctccaccccc

SEQ ID NO: 34142 - RNA, 22 nt, synthetic construct
  source 1..22: mol_type = other RNA
tctcacaggccctaagggtcct

SEQ ID NO: 34143 - RNA, 22 nt, synthetic construct
  source 1..22: mol_type = other RNA
tctccacccccaatgtaggtga

SEQ ID NO: 34144 - RNA, 22 nt, synthetic construct
  source 1..22: mol_type = other RNA
tctccagaccggccaggctcca

SEQ ID NO: 34145 - RNA, 22 nt, synthetic construct
  source 1..22: mol_type = other RNA
tctggagatgttgggaggccgt

SEQ ID NO: 34146 - RNA, 22 nt, synthetic construct
  source 1..22: mol_type = other RNA
tgaacctgccctgacctcccga

SEQ ID NO: 34147 - RNA, 22 nt, synthetic construct
  source 1..22: mol_type = other RNA
tgaatccactgggagggggtac

SEQ ID NO: 34148 - RNA, 22 nt, synthetic construct
  source 1..22: mol_type = other RNA
tgacaggtaaggacccttaggg

SEQ ID NO: 34149 - RNA, 22 nt, synthetic construct
  source 1..22: mol_type = other RNA
tgacctcccgagcaaacatgac

SEQ ID NO: 34150 - RNA, 22 nt, synthetic construct
  source 1..22: mol_type = other RNA
tgacctgcccagcatgcctgaa

SEQ ID NO: 34151 - RNA, 22 nt, synthetic construct
  source 1..22: mol_type = other RNA
tgaggtgccccaggccagccaa

SEQ ID NO: 34152 - RNA, 22 nt, synthetic construct
  source 1..22: mol_type = other RNA
tgatggagcgaaggggctggtg

SEQ ID NO: 34153 - RNA, 22 nt, synthetic construct
  source 1..22: mol_type = other RNA
tgcccagcatgcctgaacctgc

SEQ ID NO: 34154 - RNA, 22 nt, synthetic construct
  source 1..22: mol_type = other RNA
tgccccaggccagccaagtacc

SEQ ID NO: 34155 - RNA, 22 nt, synthetic construct
  source 1..22: mol_type = other RNA
tgccctgacctcccgagcaaac

SEQ ID NO: 34156 - RNA, 22 nt, synthetic construct
  source 1..22: mol_type = other RNA
tgcctgaacctgccctgacctc

SEQ ID NO: 34157 - RNA, 22 nt, synthetic construct
  source 1..22: mol_type = other RNA
tgctcgggaggtcagggcaggt

SEQ ID NO: 34158 - RNA, 22 nt, synthetic construct
  source 1..22: mol_type = other RNA
tgctgggcaggtcagtggctga

SEQ ID NO: 34159 - RNA, 22 nt, synthetic construct
  source 1..22: mol_type = other RNA
tgcttctagtacctctcacagg

SEQ ID NO: 34160 - RNA, 22 nt, synthetic construct
  source 1..22: mol_type = other RNA
tggacagtgaatccactgggag

SEQ ID NO: 34161 - RNA, 22 nt, synthetic construct
  source 1..22: mol_type = other RNA
tggagagtggtgtgagaataac

SEQ ID NO: 34162 - RNA, 22 nt, synthetic construct
  source 1..22: mol_type = other RNA
tggagatgttgggaggccgtgg

SEQ ID NO: 34163 - RNA, 22 nt, synthetic construct
  source 1..22: mol_type = other RNA
tggagcctggccggtctggaga

SEQ ID NO: 34164 - RNA, 22 nt, synthetic construct
  source 1..22: mol_type = other RNA
tggagcgaaggggctggtggag

SEQ ID NO: 34165 - RNA, 22 nt, synthetic construct
  source 1..22: mol_type = other RNA
tggattcactgtccacggcctc

SEQ ID NO: 34166 - RNA, 22 nt, synthetic construct
  source 1..22: mol_type = other RNA
tggccggtctggagatgttggg

SEQ ID NO: 34167 - RNA, 22 nt, synthetic construct
  source 1..22: mol_type = other RNA
tggcctggggcacctcacctac

SEQ ID NO: 34168 - RNA, 22 nt, synthetic construct
  source 1..22: mol_type = other RNA
tggctgatggagcgaaggggct

SEQ ID NO: 34169 - RNA, 22 nt, synthetic construct
  source 1..22: mol_type = other RNA
tggctggcctggggcacctcac

SEQ ID NO: 34170 - RNA, 22 nt, synthetic construct
  source 1..22: mol_type = other RNA
tgggaggccgtggacagtgaat

SEQ ID NO: 34171 - RNA, 22 nt, synthetic construct
  source 1..22: mol_type = other RNA
tgggagggggtacttggctggc

SEQ ID NO: 34172 - RNA, 22 nt, synthetic construct
  source 1..22: mol_type = other RNA
tgggcaggtcagtggctgatgg

SEQ ID NO: 34173 - RNA, 22 nt, synthetic construct
  source 1..22: mol_type = other RNA
tggggcacctcacctacattgg

SEQ ID NO: 34174 - RNA, 22 nt, synthetic construct
  source 1..22: mol_type = other RNA
tgggggtggagagtggtgtgag

SEQ ID NO: 34175 - RNA, 22 nt, synthetic construct
  source 1..22: mol_type = other RNA
tggtggagcctggccggtctgg

SEQ ID NO: 34176 - RNA, 22 nt, synthetic construct
  source 1..22: mol_type = other RNA
tggttattctcacaccactctc

SEQ ID NO: 34177 - RNA, 22 nt, synthetic construct
  source 1..22: mol_type = other RNA
tgtaggtgaggtgccccaggcc

SEQ ID NO: 34178 - RNA, 22 nt, synthetic construct
  source 1..22: mol_type = other RNA
tgtcatgtttgctcgggaggtc

SEQ ID NO: 34179 - RNA, 22 nt, synthetic construct
  source 1..22: mol_type = other RNA
tgtccacggcctcccaacatct

SEQ ID NO: 34180 - RNA, 22 nt, synthetic construct
  source 1..22: mol_type = other RNA
tgttgggaggccgtggacagtg

SEQ ID NO: 34181 - RNA, 22 nt, synthetic construct
  source 1..22: mol_type = other RNA
tgtttgctcgggaggtcagggc

SEQ ID NO: 34182 - RNA, 22 nt, synthetic construct
  source 1..22: mol_type = other RNA
ttacctgtcatgtttgctcggg

SEQ ID NO: 34183 - RNA, 22 nt, synthetic construct
  source 1..22: mol_type = other RNA
ttagggcctgtgagaggtacta

SEQ ID NO: 34184 - RNA, 22 nt, synthetic construct
  source 1..22: mol_type = other RNA
ttattctcacaccactctccac

SEQ ID NO: 34185 - RNA, 22 nt, synthetic construct
  source 1..22: mol_type = other RNA
ttcactgtccacggcctcccaa

SEQ ID NO: 34186 - RNA, 22 nt, synthetic construct
  source 1..22: mol_type = other RNA
ttcaggcatgctgggcaggtca

SEQ ID NO: 34187 - RNA, 22 nt, synthetic construct
  source 1..22: mol_type = other RNA
ttcgctccatcagccactgacc

SEQ ID NO: 34188 - RNA, 22 nt, synthetic construct
  source 1..22: mol_type = other RNA
ttctagtacctctcacaggccc

SEQ ID NO: 34189 - RNA, 22 nt, synthetic construct
  source 1..22: mol_type = other RNA
ttctcacaccactctccacccc

SEQ ID NO: 34190 - RNA, 22 nt, synthetic construct
  source 1..22: mol_type = other RNA
ttgctcgggaggtcagggcagg

SEQ ID NO: 34191 - RNA, 22 nt, synthetic construct
  source 1..22: mol_type = other RNA
ttggctggcctggggcacctca

SEQ ID NO: 34192 - RNA, 22 nt, synthetic construct
  source 1..22: mol_type = other RNA
ttgggaggccgtggacagtgaa

SEQ ID NO: 34193 - RNA, 22 nt, synthetic construct
  source 1..22: mol_type = other RNA
ttgggggtggagagtggtgtga

SEQ ID NO: 34194 - RNA, 22 nt, synthetic construct
  source 1..22: mol_type = other RNA
tttgctcgggaggtcagggcag

SEQ ID NO: 34195 - RNA, 20 nt, synthetic construct
  source 1..20: mol_type = other RNA
aaaaaaatgtacttggttcc

SEQ ID NO: 34196 - RNA, 17 nt, synthetic construct
  source 1..17: mol_type = other RNA
aaaatgtacttggttcc

SEQ ID NO: 34197 - RNA, 17 nt, synthetic construct
  source 1..17: mol_type = other RNA
aaaaatgtacttggttc

SEQ ID NO: 34198 - RNA, 17 nt, synthetic construct
  source 1..17: mol_type = other RNA
aaaaaatgtacttggtt

SEQ ID NO: 34199 - RNA, 17 nt, synthetic construct
  source 1..17: mol_type = other RNA
aaaaaaatgtacttggt

SEQ ID NO: 34200 - protein, 1348 aa, synthetic construct
MSIKSDYFLGLDIGTDSIGWAVTDPEYHILRRKGKALWGIRLFDAANTAAERRTFRTSRRRIQRRRQRIRLLQELFAEEMVKLDPGFFQRLSDSAFWQEDKQEQQIYSLFTCENYTDVDYYREYPTIYHLRSALIQEKKEFDLRLLYLALHHLMKHRGHFLFNGSINNVTSFHTTFQTFADCLYDEFDIELECDSEDRFAEILKDKHARKTGKCSELEIICHIEKSNKQLKELFKLITGMKASLSVVFGDDELAEIEHNKISFSESSYDEVRLALEDEIQERTGILDIFHAVYSWAILADILEGGEYEGNSYLSVAKVSTYKKHGDDLRLLRTLVREYCPDHYKSFFSVSGKENYCAYAGTLKKNGKKQPIKRCSQEDFYKALKKLLNQMPTEQPEVKDIFIEIENGTFLPLQVSKDNGVIPYQVNKMELEKILQNAEEYLPFLKNIDEECGKTVSKKIIDLFEFRIPYYVGPLNTAKGENCWMVRKEAGRIYPWNFDEKVDRDQSAEKFIRRMTNQCTYLIHEDVVPKNSLLYSEFMVLNELNNVKIRSEKLPVELKQAIVLDLFKKQKQITGKKLLNYLNANGYDVKKEDLSGFDGNFKSSLSSYLTLKKVFGEELDKYSVQQMAEDIILWITLYGDDQKMLRRVIRKHYEQQLSEEQILSLSKLKFQGWGRLSRRLLSEMEGVDCETGECMTVMQGLRNTQNNLMQLLSQQFSFMELIEEENGNYYVDEITYDNLVKDMVISPSVKRAVWQTVQIVEEIKGVMGCQPKKIFVEMARSDEEKKRTVSRKDRLLEAYDAIKDEARQWQEELQKYSDGDFKAIKLYLYYTQMGQCMYTGRKIDLSQLNDATVWDRDHIYPQSKTKDDSLDNLVLVDRSVNAKKSDGMLSPEIQQRMRATWKYLKEKKLISEKKYERLTRVSPLTDEELAGFINRQLVETRQSSKAVATLLKRVYDEAEIVYVKAEAVSNFRRDNLDYIKVRDLNDYHHAKDAYQNIVVGNVFHEKFTSNPLRWLKNNPNTKYSLNQMFNFDLEKNGVVIWKRGKAGSIKCVEETLKRNDILFTRYAFCNKGGFFNQMLTAAPEDKTKAKGLVPIKKGMETWKYGGYTSVTPSHFMLVASKDKKGKEIRTIETVPLYRWKEFKENPDALLQYCREFYGLKEPKVLIPCIKKNARLVVNGFPMHLKGSTGKQLILQGAVQLCLNNENIKYLKKVTKYLEYNAQRRDKRTLLEVREVTGINKEENIQLYDVFVDKLSNTIYQYRPANPKDNLIKGREKFIELGLAEQCVVLGEVLHLFQCKPLTSDLTLIGGSPNTGTIKITKTISNCNVVKLLSQSIAGVKVREINLLII

SEQ ID NO: 34201 - DNA, 4047 bp, synthetic construct
  source 1..4047: mol_type = other DNA
atgagcataaaaagtgattattttttaggacttgatattggtacggattctattggatgggcggtaaccgacccagaatatcacatattgagacgaaaaggtaaagcattatggggaataagattatttgatgcggccaatacagcggcagaacggcgaacatttaggacaagccgaagaaggattcagagaagacgacagagaattcggttattgcaagaattatttgcagaagaaatggtaaaattagacccaggattttttcagaggttgtcagacagcgcattttggcaggaggataagcaagagcagcaaatttattcactttttacttgtgaaaattatacagatgttgattattacagagaatatcctactatttatcatttgagaagtgcattgattcaggaaaagaaggaatttgatcttcgtcttctatatcttgctcttcaccatttgatgaagcacaggggacatttcctgtttaatgggagtattaataatgtgacgtcatttcatacgacgtttcagacgtttgcagattgtctttatgatgagtttgatatagaactggaatgtgattccgaagatagatttgcagaaattttaaaggataaacatgccagaaaaacaggaaaatgttctgaattagagataatctgtcatatagaaaaatcaaataagcagctaaaagaactttttaaattaattacaggaatgaaagctagtttgagtgttgtgtttggtgatgatgagttagcggaaatagaacataataagattagtttttcagagagtagttatgatgaagtacgtcttgcattggaggatgagattcaggagaggactggtatactggatatctttcatgcagtttatagttgggcgattctcgcggatattttagaaggcggagaatatgaggggaattcttatctaagcgttgcgaaggtaagcacttataaaaagcatggtgatgatttgcggttgctaagaacactggttcgggaatattgtcctgatcattacaaatctttcttttccgtatcagggaaggagaattattgtgcatatgcgggtactttaaaaaagaatggaaaaaaacagccgattaaacgttgcagccaggaagatttttataaagcgttaaagaaattgctgaatcagatgccgacagaacaaccagaagtgaaagacatcttcatcgaaattgaaaatggtacttttttgccgttgcaggtaagtaaggataatggagtgataccttatcaggtaaataagatggaattagaaaaaatcctgcagaatgcagaggaatatttgccatttctaaaaaatatagatgaagaatgtggaaaaacggttagtaagaagattatagatctctttgagtttagaataccatattatgtagggccgcttaataccgctaaaggagaaaactgttggatggtcagaaaagaagcggggagaatatatccgtggaattttgatgaaaaggtagacagagatcaatcagcagaaaaatttatccgtagaatgacgaatcagtgtacatatttaatacatgaggatgttgtacctaaaaattctttgctttattcggagtttatggtgcttaatgaattaaataatgtaaagatccggtctgagaagctgccggtggagttaaaacaggcaatagtattggatttgtttaagaaacaaaagcagataacaggaaaaaaacttcttaattacttgaatgcaaatggatatgatgtaaaaaaagaagatttgtcagggtttgacggaaactttaaatcatctctgtcatcatatcttactttgaaaaaagtatttggtgaagaattagataaatatagtgtgcagcagatggcagaggatattatcttgtggatcactctgtatggagatgatcagaagatgttgcgcagggtaattcgaaaacattatgaacagcaattgagtgaagaacagattctttccttatcgaaattgaaattccaaggctggggaagattatccagacgacttttgagtgaaatggaaggcgttgattgtgagactggtgagtgtatgacggtcatgcaaggacttcgtaatactcagaataatctgatgcagcttctaagtcagcagttttcatttatggaattgattgaggaagaaaatgggaattattatgtagatgagattacatacgataatcttgtgaaagatatggttatatctccgtcagtgaagagagcagtctggcagacagttcagattgtggaggagattaagggggtaatgggctgtcagcctaagaagatatttgtcgagatggcgcgaagcgatgaagagaaaaagcgtactgtatctaggaaagacaggttattagaagcatatgatgcgatcaaggatgaggctcgtcaatggcaggaagagttgcaaaagtattcagatggtgattttaaggctattaaactttatctgtattatacgcagatggggcaatgtatgtatactggaagaaagatagatctgtcacaattaaatgatgcgacggtatgggacagagatcatatatatccacagtccaaaacaaaagatgatagtctggataatctggtattggtagaccggagcgtgaacgctaagaaaagtgatgggatgctatcacctgagattcagcagagaatgcgggctacttggaaatacttaaaagagaaaaagttgatttcagagaagaaatatgagcgtttgactagggtctcaccacttacagatgaggaattggcaggttttattaatcgacagttagttgaaacacgtcagtcttcgaaagcagtagcaacacttttgaaacgagtatatgatgaagcggagattgtctatgtaaaagcggaagctgtttcaaattttagaagagataatttggattatattaaggtgcgtgatctgaatgattatcatcatgctaaagatgcatatcagaatattgtagtggggaatgtttttcatgagaaatttaccagcaatccgcttcgttggctgaaaaacaatcctaatacgaaatatagtttaaatcagatgtttaactttgatttagagaaaaatggggtggtaatatggaaaagggggaaggctggaagtattaaatgtgttgaagaaacattgaaaagaaatgatattctttttacacgatatgctttttgtaataaaggtggtttttttaaccagatgttaacggcagctccagaagataaaacgaaagcaaagggacttgtaccaataaaaaaaggtatggaaacatggaaatacgggggatatacatcagtaactccgtcacattttatgttggttgcttcgaaagataagaaaggaaaggagataagaacgattgagacagttccgttgtataggtggaaagagttcaaagaaaatccagatgcattactccaatattgtagagagttctatggtttgaaagagcccaaggtgttgataccatgcatcaagaagaatgccagattagtcgttaatggatttccaatgcatttgaaagggagtacaggaaaacaattgattttgcagggagcggttcaattatgtctgaataatgaaaatataaagtatttgaaaaaagtcacaaaatatttggaatataatgcacagagaagagataaaagaacactgctggaagtaagagaggttacaggaattaacaaagaggaaaatatacagttatatgatgtgtttgttgataaattgagtaacacaatatatcagtatcgtccggccaatccaaaggacaatcttataaaaggaagagagaagtttatagaattagggttggcagaacaatgtgttgtgttaggtgaagtattgcatttgttccaatgtaaaccactcacgtctgatttgactttgattggaggttcaccgaatacagggacaataaaaataacaaagacaattagtaattgtaatgttgtaaagttgttaagccaatctattgcaggtgttaaagtgagagaaattaatttgttaataatatga

SEQ ID NO: 34202 - DNA, 4044 bp, synthetic construct
  source 1..4044: mol_type = other DNA
tctatcaagagcgactacttcctgggcctcgacatcggcacagattctatcggatgggccgtgacagaccccgagtaccacatcctgagaagaaagggcaaagccctgtggggcatcagactgttcgatgccgccaatactgccgccgagagaagaaccttccggaccagcagaagaagaatccagcggcggagacagcggatcagactgctgcaagagctgttcgccgaggaaatggttaagctggaccccggcttcttccagagactgagcgatagcgccttctggcaagaggacaagcaagagcagcagatctacagcctgtttacctgcgagaactacaccgacgtggactactacagagagtaccccaccatctaccacctgagaagcgccctgatccaagagaaaaaagagttcgacctgcggctgctgtatctggccctgcaccatctgatgaagcaccggggccactttctgttcaacggcagcatcaacaacgtgaccagcttccacaccaccttccagaccttcgccgactgcctgtacgacgagttcgacatcgagctggaatgcgacagcgaggacagattcgccgagatcctgaaggataagcacgccagaaagaccggcaagtgctctgagctggaaatcatctgccacatcgagaagtccaacaagcagctgaaagaactgttcaagctgatcaccggcatgaaggccagcctgagcgtggtgtttggagatgatgagctggccgagatcgagcacaacaagatcagcttcagcgagagcagctacgacgaagtgcggctggccctggaagatgagattcaagagagaaccggcatcctggacatcttccacgccgtgtattcttgggccatcctggccgatattctggaaggcggcgagtacgagggcaacagctatctgtctgtggccaaggtgtccacctacaagaagcacggcgacgacctgagactgctgagaacactcgtgcgcgagtactgccccgaccactacaagagctttttcagcgtgtccggcaaagagaactactgcgcctacgccggcacactgaagaagaacggcaagaagcagcccatcaagcggtgcagccaagaggacttctacaaggccctgaagaaactgctgaaccagatgcctaccgagcagcccgaagtgaaggatatcttcatcgagattgagaacggcaccttcctgcctctgcaagtgtccaaggacaacggcgtgatcccctaccaagtgaacaagatggaactcgagaagatcctgcagaacgccgaagagtacctgcctttcctgaagaacatcgacgaggaatgcggcaagaccgtgtccaagaagatcatcgacctgttcgagttcagaatcccctactacgtgggccctctgaataccgccaagggcgagaattgctggatggttcgaaaagaggccggcagaatctacccctggaacttcgatgagaaggtggacagagatcagagcgccgagaagttcatcagacggatgaccaaccagtgcacctacctgatccacgaggacgtggtgcctaagaacagcctgctgtactccgagttcatggtgctgaacgagctgaacaatgtgaagattcggagcgagaagctgcccgtggaactgaagcaggccatcgtgctggacctgtttaagaagcagaagcagatcacagggaagaagctgctcaactacctgaacgccaacggctacgacgtgaagaaagaggacctgagcggcttcgacggcaacttcaagtccagcctgtccagctacctgactctgaagaaggtgttcggagaggaactggacaagtacagcgtgcagcagatggccgaggacatcatcctgtggatcaccctgtatggcgacgatcagaaaatgctgcggagagtgatccggaagcactacgagcagcagctgtctgaggaacagatcctgagcctgagcaagctgaagttccaaggctggggcagactgtctagacggctgctctctgaaatggaaggcgtggactgtgaaaccggcgagtgcatgacagtgatgcagggcctgagaaacacccagaacaacctgatgcagctgctgagccagcagttcagcttcatggaactgatcgaggaagagaacgggaactactacgtcgacgagatcacctacgacaacctggtcaaggacatggtcatcagccctagcgtgaaaagggccgtgtggcagacagtgcagatcgtggaagaaatcaagggcgtgatgggatgccagcctaagaaaatcttcgtggaaatggcccgcagcgacgaagagaagaaacggaccgtgtctcggaaggatcggctgctggaagcctacgacgccatcaaggatgaggcccggcaatggcaagaagaactgcagaaatactccgacggcgatttcaaggccatcaagctgtacctgtactacacccagatgggccagtgcatgtacaccggcagaaaaatcgatctgtcccagctgaacgacgccaccgtgtgggatagagatcacatctaccctcagagcaagaccaaggacgacagcctggacaatctggtgctggtggatagatccgtgaatgccaagaaaagcgacggcatgctgagccccgagatccagcagagaatgagagccacctggaagtacctgaaagaaaagaagctcatcagcgagaagaagtacgagcggctgaccagagtgtcccctctgacagatgaagaactggccggcttcatcaaccggcagctggtggaaacaagacagagcagcaaagccgtggccacactgctgaagagggtgtacgatgaggccgagattgtgtatgtgaaggccgaggccgtgtctaacttccggcgggataacctggactacatcaaagtgcgggacctgaacgactaccaccacgccaaggacgcctaccagaacatcgtcgtgggcaacgtgttccacgagaagtttaccagcaatcccctgcggtggctgaaaaacaaccccaacaccaagtactccctcaaccagatgttcaacttcgacctggaaaagaacggcgtggtcatctggaagagaggcaaggccggctccattaagtgtgtggaagagacactgaagcggaacgacatcctgttcaccagatacgctttctgcaacaaaggcggcttctttaatcagatgctgaccgccgctccagaggataagacaaaggccaaaggcctggtgcctatcaagaaaggcatggaaacctggaaatacggcggctacaccagcgtgacccctagccactttatgctggtggccagcaaggacaagaagggaaaagagatccggaccatcgagacagtgcccctgtaccggtggaaagagttcaaagagaatcccgacgctctgctccagtactgcagagagttctacggcctgaaagagcccaaggttctgatcccttgcatcaagaagaatgcccggctggtcgtgaacggcttccctatgcacctgaagggcagcaccggaaaacagctgattctgcagggtgccgtgcagctgtgcctgaacaacgagaacatcaagtacctcaagaaagtgacgaagtacctcgagtacaacgcccagcggagagacaagagaaccctgctcgaagttcgggaagtgaccggaatcaacaaagaggaaaacatccagctgtacgatgtgttcgtggacaagctgagcaacacaatctaccagtacagacccgccaatcctaaggacaacctcatcaagggccgcgagaaattcatcgagcttggcctggctgagcagtgcgtggtgctgggagaagtgctgcatctgttccagtgcaagcccctgaccagcgatctgacactgatcggcggaagccctaacaccggcaccatcaagatcaccaagaccatcagcaactgcaacgtggtcaagctgctgtcccagtctatcgccggcgtgaaagtccgcgagatcaacctgctgatcatctga

SEQ ID NO: 34203 - RNA, 107 nt, synthetic construct
  source 1..107: mol_type = other RNA
gtttgagagtagtgtaagaaattacactacaagttcaaataaaaatttattcaaatccatttgctacattgtgtagaatttaaagatctggcaacagatcttttttt
